(19) United States
(12) Patent Application Publication
(10) Pub. No.: US 2007/0015148 A1
(43) Pub. Date: Jan. 18, 2007

(54) Gene expression profiles in breast tissue

(76) Inventors: Michael S Orr, Gaithersburg, MD (US); MIchelle Nation, Gaithersburg, MD (US); James C Diggans, Gaithersburg, MD (US); Wen Zeng, Gaithersburg, MD (US)

Correspondence Address: MORGAN LEWIS & BOCKIUS LLP, 1111 PENNSYLVANIA AVENUE NW, WASHINGTON, DC, 20004, US

(21) Appl. No.: 10/470,050

(22) PCT Filed: Jan. 25, 2002
(86) PCT No.: PCT/US02/02176

§ 371 Date: Jul. 25, 2003

Related U.S. Application Data
(60) Provisional application No. 60/263,757, filed on Jan. 25, 2001.
(60) Provisional application No. 60/286,090, filed on Apr. 25, 2001.
(60) Provisional application No. 60/292,517, filed on May 23, 2001.

(51) Int. Cl. C12Q 1/68; A61K 48/00

(52) U.S. Cl. 435/6; 514/44

(57) ABSTRACT

The present invention results from the examination of tissue from breast carcinomas to identify genes differentially expressed between tumor biopsies and normal tissue. The invention includes diagnostic and screening methods using these genes as well as solid supports comprising oligonucleotide arrays that are complementary to or hybridize to the differentially expressed genes.

### RELATED APPLICATIONS

[0001] This application claims the priority of U.S. Provisional Application No. 60/263,757, filed Jan. 25, 2001, 60/286,090, filed Apr. 25, 2001, and 60/292,517, filed May 23, 2001, all of which are herein incorporated by reference in their entirety.

### BACKGROUND OF THE INVENTION

[0002] One of the most pressing health issues today is breast cancer. In the industrial world, about one woman in every nine can expect to develop breast cancer in her lifetime. In the United States, it is the most common cancer amongst women, with an annual incidence of about 175,000 new cases and nearly 50,000 deaths. Despite an ongoing improvement in our understanding of the disease, breast cancer has remained resistant to medical intervention. Most clinical initiatives are focused on early diagnosis, followed by conventional forms of intervention, particularly surgery and chemotherapy. Such interventions are of limited success, particularly in patients where the tumor has undergone metastasis. There is a pressing need to improve the arsenal of therapies available to provide more precise and more effective treatment in a less invasive way. A promising area for the development of new modalities has emerged from recent understanding of the genetics of cancer.

[0003] One model used to characterize breast carcinogenesis asserts that normal cells undergo a multi-step process that broadly includes the steps of hyperplasia, pre-malignant change and in situ carcinoma. Multiple factors lead to a typical cell proliferation followed by carcinoma in situ. Carcinoma in situ is characterized as either ductal or lobular in form with the majority of invasive carcinomas being classified as ductal (85-95%). Among the ductal carcinomas, 15-20% encompass tubular, medullary, mucinous, papillary, adenoid, cystic, metaplastic, apocrine, squamous, secretory, lipid-rich, and cystic hypersecretory while the remaining ductal carcinomas are not specified.

[0004] To date, researchers have been able to identify a few genetic alterations believed to underlie tumor development. These genetic alterations include amplification of oncogenes and mutations that result in the loss of tumor suppressor genes. Tumor suppressor genes are genes that, in their wild-type alleles, express proteins that suppress abnormal cellular proliferation. When the gene coding for a tumor suppressor protein is mutated or deleted, the resulting mutant protein or the complete lack of tumor suppressor protein expression may fail to correctly regulate cellular proliferation, and abnormal proliferation may take place, particularly if there is already existing damage to the cellular regulatory mechanism. A number of well-studied human tumors and tumor cell lines have missing or non-functional tumor suppressor genes. Examples of tumor suppressor genes include, but are not limited to, the retinoblastoma susceptibility gene or RB gene, the p53 gene, the deletion in colon carcinoma (DCC) gene and the neurofibromatosis type 1 (NF-1) tumor suppressor gene (Weinberg, Science 254,1138-1146 (1991)). Loss of function or inactivation of tumor suppressor genes may play a central role in the initiation and/or progression of a significant number of human cancers.

[0005] Classification of heterogeneous populations of tumor types is a daunting task; yet, studies utilizing gene expression patterns to identify subtypes of cancer have produced initial results (see Perou, C. M. et al., Proc Natl Acad Sci USA 96, 9212-9217 (1999), Golub, T. R. et al., Science 286, 531-7 (1999), Alizadeh, A. A. et al., Nature 403, 503-11 (2000), Alon, U. et al. Proc Natl Acad Sci USA 96, 6745-50 (1999) and Bittner, M. et al., Nature 406, 536-40 (2000)). For example, molecular classification of B-cell lymphoma by gene expression profiling elucidated clinically distinct diffuse large-B-cell lymphoma subgroups (see Alizadeh supra). Stratification of patients based on their distinctive gene expression profiles may allow researchers to precisely group similar patient populations for evaluating chemotherapeutic agents. The more homogenous population of patients decreases the variability of patient-to-patient responses leading to the development of agents capable of eradicating specific subtypes of cancers previously unknown using standard classification techniques.

[0006] A study by Martin et al. (Cancer Res 60, 2232-8 (2000)) used a custom microarray composed of 124 genes discovered by differential display associated with either normal breast epithelial cells or from the MDA-MB-435 malignant breast tumor cell line. Using the custom microarray, researchers examined the relationship between expression patterns discovered by clustering a number of genes with clinical stages of breast cancer, indicating that gene expression patterns were capable of grouping breast tumors into distinct categories (Martin et al., supra).

[0007] The utilization of gene expression profiles to classify tumors, to identify drug targets, to identify diagnostic markers and/or to gain further insights into the consequences of chemotherapeutic treatments could facilitate the design of more efficacious patient-specific stratagems for treating a variety of cancers. In breast cancer, studies utilizing limited numbers of genes have classified tumors into subtypes based on gene expression profiles, and this study indicated a diversity of molecular phenotypes associated with breast tumors (Perou, C. M. et al., Nature 406, 747-52 (2000).

[0008] Although these studies have demonstrated that expression profiling may be used to produce improvements in diagnosis of breast cancer as well as the development of improved therapeutic strategies, further studies are needed as only a small portion of the genome was studied and analyses containing greater numbers of genes will advance our understanding of breast tumors even further. Accordingly, there remains a need in the art for materials and methods that permit a more accurate diagnosis of breast cancer and, in particular, ductal carcinoma. In addition, there remains a need in the art for methods to treat and methods to identify agents that can effectively treat breast cancer. The present invention meets these and other needs.

### SUMMARY OF THE INVENTION

[0009] The present invention is based on the discovery of the genes and their expression profiles associated with various types and stages of breast cancer.

[0010] The invention includes methods of diagnosing breast cancer in a patient comprising the step of detecting the level of expression in a tissue sample of two or more genes from Tables 1-5; wherein differential expression of the genes in Tables 1-5 is indicative of breast cancer.

[0011] The invention also includes methods of detecting the progression of breast cancer. For instance, methods of the invention include detecting the progression of breast cancer in a patient comprising the step of detecting the level of expression in a tissue sample of two or more genes from Tables 1-5; wherein differential expression of the genes in Tables 1-5 is indicative of breast cancer progression. In some preferred embodiments, PCA (Principal Component Analysis) based on all or a portion of the group of 50 genes identified in Table 1 may be used to differentiate between the different stages of breast cancer such as normal versus DCIS (ductal carcinoma in-situ) or DCIS versus microinvasive tissue samples. In some preferred embodiments, one or more genes may be selected from Tables 1, 3, 4 and/or 5.

[0012] In some aspects, the present invention provides a method of monitoring the treatment of a patient with breast cancer, comprising administering a pharmaceutical composition to the patient and preparing a gene expression profile from a cell or tissue sample from the patient and comparing the patient gene expression profile to a gene expression from a cell population comprising normal breast cells or to a gene expression profile from a cell population comprising breast cancer cells or to both. In some preferred embodiments, the gene profile will include the expression level of one or more genes in Tables 1-5.

[0013] Another aspect of the present invention includes a method of treating a patient with breast cancer, comprising administering to the patient a pharmaceutical composition, wherein the composition alters the expression of at least one gene in Tables 1-5, preparing a gene expression profile from a cell or tissue sample from the patient comprising tumor cells and comparing the patient expression profile to a gene expression profile from an untreated cell population comprising breast cancer cells.

[0014] In another aspect, the present invention provides a method of identifying ductal carcinoma in a patient, comprising detecting the level of expression in a tissue sample of two or more genes from Tables 1-5, wherein differential expression of the genes in Tables 1-5 is indicative of ductal carcinoma. In addition, by determining the expression level of two or more genes in the group of genes listed in Tables 1-5, one skilled in the art can differentiate between DCIS and a cribiform type of DCIS that is more prone to microinvasion.

[0015] In another aspect, the present invention provides a method of detecting the progression of carcinogenesis in a patient, comprising detecting the level of expression in a tissue sample of two or more genes from Tables 1-5; wherein differential expression of the genes in Tables 1-5 is indicative of breast carcinogenesis. FIGS. 6 and 7 are a graphical representation of how the genes listed in Table 5 cluster with disease stages in breast cancer.

[0016] The invention further includes methods of screening for an agent capable of modulating the onset or progression of breast cancer, comprising the steps of exposing a cell to the agent; and detecting the expression level of two or more genes from Tables 1-5. In some embodiments, the breast cancer may be a ductal carcinoma. In some preferred embodiments, one or more genes may be selected from a group consisting of those listed in Tables 1, 3, 4 and/or 5. In some preferred methods, it may be desirable to detect all or nearly all of the genes in the tables.

[0017] The invention further includes compositions comprising at least two oligonucleotides, wherein each of the oligonucleotides comprises a sequence that specifically hybridizes to a gene in Tables 1-5 as well as solid supports comprising at least two probes, wherein each of the probes comprises a sequence that specifically hybridizes to a gene in Tables 1-5. In some preferred embodiments, one or more genes may be selected from a group consisting of those listed in Tables 1, 3, 4 and/or 5.

[0018] The invention further includes computer systems comprising a database containing information identifying the expression level in breast tissue of a set of genes comprising at least two genes in Tables 1-5 and a user interface to view the information. In some preferred embodiments, one or more genes may be selected from a group consisting of those listed in Tables 1, 3, 4 and/or 5. The database may further include sequence information for the genes, information identifying the expression level for the set of genes in normal breast tissue and cancerous tissue and may contain links to external databases such as GenBank.

[0019] Lastly, the invention includes methods of using the databases, such as methods of using the disclosed computer systems to present information identifying the expression level in a tissue or cell of at least one gene in Tables 1-5, comprising the step of comparing the expression level of at least one gene in Tables 1-5 in the tissue or cell to the level of expression of the gene in the database. In some preferred embodiments, two or more genes may be selected from a group consisting of those listed in Tables 1, 3, 4 and/or 5.

### BRIEF DESCRIPTION OF THE DRAWINGS

[0020] FIG. 1 is an E-northern showing the expression of topoisomerase II alpha in various tissue types.

[0021] FIG. 2 is an E-northern showing the expression of ICBP90 in various tissue types.

[0022] FIG. 3 is an E-northern showing the expression of MCT4 gene.

[0023] FIG. 4 is an E-northern showing the expression of the frizzled related protein.

[0024] FIG. 5 is an E-northern showing the expression of an EST Affy ID AI668620.

[0025] FIG. 6 is a PCA of the set of 28 samples using the top 50 genes identified by p-values.

[0026] FIG. 7 is a PCA of the set of 33 samples using the top 50 genes and ESTs identified by p-values.

[0027] FIG. 8 is a PCA of the set of 91 samples using the top 31 myo-lamina genes and ESTs.

### DETAILED DESCRIPTION OF THE PREFERRED EMBODIMENTS

[0028] Many biological functions are accomplished by altering the expression of various genes through transcriptional (e.g., through control of initiation, provision of RNA precursors, RNA processing, etc.) and/or translational control. For example, fundamental biological processes such as cell cycle, cell differentiation and cell death, are often characterized by the variations in the expression levels of groups of genes.

[0029] Changes in gene expression also are associated with pathogenesis. For example, the lack of sufficient expression of functional tumor suppressor genes and/or the over expression of oncogene/protooncogenes could lead to tumorgenesis or hyperplastic growth of cells (Marshall, Cell 64, 313-326 (1991); Weinberg, Science, 254, 1138-1146 (1991)). Thus, changes in the expression levels of particular genes (e.g., oncogenes or tumor suppressors) serve as signposts for the presence and progression of various diseases.

[0030] Monitoring changes in gene expression may also provide certain advantages during drug screening and development. Often drugs are pre-screened for the ability to interact with a major target without regard to other effects the drugs have on cells. Often such other effects cause toxicity in the whole animal, which prevent the development and use of the potential drug.

[0031] Applicants have examined samples from normal breast tissue and from cancerous breast tissue to identify global changes in gene expression between tumor biopsies and normal tissue. These global changes in gene expression, also referred to as expression profiles, provide useful markers for diagnostic uses as well as markers that can be used to monitor disease states, disease progression, drug toxicity, drug efficacy and drug metabolism.

[0032] The gene expression profiles described herein were derived from normal and tumor samples from female patients between the ages of 39 and 52 years old, and were from three different ethnic origins (Caucasian, African-American and Asian). Infiltrating Ductal Carcinoma (IDC) patient samples were studied for cancer-related expression, as 85% of the breast cancer patients were afflicted with this form of the disease.

[0033] Histological analysis of each tissue sample was performed and samples were segregated into either normal or malignant categories. The normal tissue samples were acquired from neighboring tissue of patients suffering from one of the following disorders: macromastia, mild fibrosis, infiltrating lobular carcinoma, or infiltrating ducal carcinoma, however; each tissue was diagnosed as normal by histological analysis. Samples were also characterized by the type and grade of IDC for each patient sample utilized in the study.

[0034] The present invention provides compositions and methods to detect the level of expression of genes that may be differentially expressed dependent upon the state of the cell, i.e., normal versus cancerous. These expression profiles of genes provide molecular tools for evaluating toxicity, drug efficacy, drug metabolism, development, and disease monitoring. Changes in the expression profile from a baseline profile can be used as an indication of such effects. Those skilled in the art can use any of a variety of known techniques to evaluate the expression of one or more of the genes and/or gene fragments identified in the instant application in order to observe changes in the expression profile in a tissue or sample of interest.

Definitions

[0035] In the description that follows, numerous terms and phrases known to those skilled in the art are used. In the interest of clarity and consistency of interpretation, the definitions of certain terms and phrases are provided.

[0036] As used herein, the phrase “detecting the level of expression” includes methods that quantify expression levels as well as methods that determine whether a gene of interest is expressed at all. Thus, an assay which provides a yes or no result without necessarily providing quantification of an amount of expression is an assay that requires “detecting the level of expression” as that phrase is used herein.

[0037] As used herein, oligonucleotide sequences that are complementary to one or more of the genes described herein, refers to oligonucleotides that are capable of hybridizing under stringent conditions to at least part of the nucleotide sequence of said genes. Such hybridizable oligonucleotides will typically exhibit at least about 75% sequence identity at the nucleotide level to said genes, preferably about 80% or 85% sequence identity or more preferably about 90% or 95% or more nucleotide sequence identity to said genes.

[0038] “Bind(s) substantially” refers to complementary hybridization between a probe nucleic acid and a target nucleic acid and embraces minor mismatches that can be accommodated by reducing the stringency of the hybridization media to achieve the desired detection of the target polynucleotide sequence.

[0039] The terms “background” or “background signal intensity” refer to hybridization signals resulting from non-specific binding, or other interactions, between the labeled target nucleic acids and components of the oligonucleotide array (e.g., the oligonucleotide probes, control probes, the array substrate, etc.). Background signals may also be produced by intrinsic fluorescence of the array components themselves. A single background signal can be calculated for the entire array, or a different background signal may be calculated for each target nucleic acid. In a preferred embodiment, background is calculated as the average hybridization signal intensity for the lowest 5% to 10% of the probes in the array, or, where a different background signal is calculated for each target gene, for the lowest 5% to 10% of the probes for each gene. Of course, one of skill in the art will appreciate that where the probes to a particular gene hybridize well and thus appear to be specifically binding to a target sequence, they should not be used in a background signal calculation. Alternatively, background may be calculated as the average hybridization signal intensity produced by hybridization to probes that are not complementary to any sequence found in the sample (e.g., probes directed to nucleic acids of the opposite sense or to genes not found in the sample such as bacterial genes where the sample is mammalian nucleic acids). Background can also be calculated as the average signal intensity produced by regions of the array that lack any probes at all.

[0040] The phrase “hybridizing specifically to” refers to the binding, duplexing or hybridizing of a molecule substantially to or only to a particular nucleotide sequence or sequences under stringent conditions when that sequence is present in a complex mixture (e.g., total cellular) DNA or RNA.

[0041] Assays and methods of the invention may utilize available formats to simultaneously screen at least about 100, preferably about 1000, more preferably about 10,000 and most preferably about 1,000,000 or more different nucleic acid hybridizations.

[0042] The terms “mismatch control” or “mismatch probe” refer to a probe whose sequence is deliberately selected not to be perfectly complementary to a particular target sequence. For each mismatch (MM) control in a high-density array there typically exists a corresponding perfect match (PM) probe that is perfectly complementary to the same particular target sequence. The mismatch may comprise one or more bases that are not complementary to the corresponding bases of the target sequence.

[0043] While the mismatch(s) may be located anywhere in the mismatch probe, terminal mismatches are less desirable as a terminal mismatch is less likely to prevent hybridization of the target sequence. In a particularly preferred embodiment, the mismatch is located at or near the center of the probe such that the mismatch is most likely to destabilize the duplex with the target sequence under the test hybridization conditions.

[0044] The term “perfect match probe” refers to a probe that has a sequence that is perfectly complementary to a particular target sequence. The test probe is typically perfectly complementary to a portion (subsequence) of the target sequence. The perfect match (PM) probe can be a “test probe”, a “normalization control” probe, an expression level control probe and the like. A perfect match control or perfect match probe is, however, distinguished from a “mismatch control” or “mismatch probe.”

[0045] As used herein a “probe” is defined as a nucleic acid, preferably an oligonucleotide, capable of binding to a target nucleic acid of complementary sequence through one or more types of chemical bonds, usually through complementary base pairing, usually through hydrogen bond formation. As used herein, a probe may include natural (i.e., A, G, U, C or T) or modified bases (7-deazaguanosine, inosine, etc.). In addition, the bases in probes may be joined by a linkage other than a phosphodiester bond, so long as it does not interfere with hybridization. Thus, probes may be peptide nucleic acids in which the constituent bases are joined by peptide bonds rather than phosphodiester linkages.

[0046] The term “stringent conditions” refers to conditions under which a probe will hybridize to its target subsequence, but with only insubstantial hybridization to other sequences or to other sequences such that the difference may be identified. Stringent conditions are sequence-dependent and will be different in different circumstances. Longer sequences hybridize specifically at higher temperatures. Generally, stringent conditions are selected to be about 5° C. lower than the thermal melting point (Tm) for the specific sequence at a defined ionic strength and pH.

[0047] Typically, stringent conditions will be those in which the salt concentration is at least about 0.01 to 1.0 M sodium ion concentration (or other salts) at pH 7.0 to 8.3 and the temperature is at least about 30° C. for short probes (e.g., 10 to 50 nucleotide). Stringent conditions may also be achieved with the addition of destabilizing agents such as formamide.

[0048] The “percentage of sequence identity” or “sequence identity” is determined by comparing two optimally aligned sequences or subsequences over a comparison window or span, wherein the portion of the polynucleotide sequence in the comparison window may optionally comprise additions or deletions (i.e., gaps) as compared to the reference sequence (which does not comprise additions or deletions) for optimal alignment of the two sequences. The percentage is calculated by determining the number of positions at which the identical subunit (e.g., nucleic acid base or amino acid residue) occurs in both sequences to yield the number of matched positions, dividing the number of matched positions by the total number of positions in the window of comparison and multiplying the result by 100 to yield the percentage of sequence identity. Percentage sequence identity when calculated using the programs GAP or BESTFIT (see below) is calculated using default gap weights.

[0049] Homology or identity may be determined by BLAST (Basic Local Alignment Search Tool) analysis using the algorithm employed by the programs blastp, blastn, blastx, tblastn and tblastx (Karlin et al., Proc Natl Acad Sci USA 87, 2264-2268 (1990) and Altschul, J Mol Evol 36, 290-300 (1993), fully incorporated by reference) which are tailored for sequence similarity searching. The approach used by the BLAST program is to first consider similar segments between a query sequence and a database sequence, then to evaluate the statistical significance of all matches that are identified and finally to summarize only those matches which satisfy a preselected threshold of significance. For a discussion of basic issues in similarity searching of sequence databases, see Altschul et al., (Nature Genet 6, 119-129 (1994)) which is fully incorporated by reference. The search parameters for histogram, descriptions, alignments, expect (i.e., the statistical significance threshold for reporting matches against database sequences), cutoff, matrix and filter are at the default settings. The default scoring matrix used by blastp, blastx, tblastn, and tblastx is the BLOSUM62 matrix (Henikoff et al., Proc Natl Acad Sci USA 89, 10915-10919, (1992) fully incorporated by reference). Four blastn parameters were adjusted as follows: Q=10 (gap creation penalty); R=10 (gap extension penalty); wink=1 (generates word hits at every wink^{th} position along the query); and gapw=16 (sets the window width within which gapped alignments are generated). The equivalent Blastp parameter settings were Q=9; R=2; wink=1; and gapw=32. A Bestfit comparison between sequences, available in the GCG package version 10.0, uses DNA parameters GAP=50 (gap creation penalty) and LEN=3 (gap extension penalty) and the equivalent settings in protein comparisons are GAP=8 and LEN=2.

Uses of Differentially Expressed Genes

[0050] The present invention identifies those genes differentially expressed between normal breast tissue and cancerous breast tissue. One of skill in the art can select one or more of the genes identified as being differentially expressed in Tables 1-5 and use the information and methods provided herein to interrogate or test a particular sample. For a particular interrogation of two conditions or sources, it may be desirable to select those genes which display a great deal of difference in the expression pattern between the two conditions or sources. At least a two-fold difference may be desirable, but a three-fold, five-fold or ten-fold difference may be preferred in some instances. Interrogations of the genes or proteins can be performed to yield different information.

Diagnostic Uses for the Breast Cancer Markers

[0051] As described herein, the genes and gene expression information provided in Tables 1-5 may be used as diagnostic markers for the prediction or identification of the malignant state of breast tissue. For instance, a breast tissue sample or other sample from a patient may be assayed by any of the methods known to those skilled in the art, and the expression levels from one or more genes from Tables 1-5, may be compared to the expression levels found in normal breast tissue, tissue from breast carcinoma or both. Expression profiles generated from the tissue or other samples that substantially resemble an expression profile from normal or diseased breast tissue may be used, for instance, to aid in disease diagnosis. Comparison of the expression data, as well as available sequence or other information may be done by researcher or diagnostician or may be done with the aid of a computer and databases as described herein.

[0052] For example, genes over-expressed by 3-fold or greater, as well as having the smallest p-values from a t-test, were discovered by comparing 13 normal tissue samples and 15 infiltrating ductal carcinoma tissue samples composed of mostly stage II and III tissue samples. This analysis provided a set of genes (listed in Table 1) capable of distinguishing between the 13 normal and 15 tumor samples by PCA (Principal Component Analysis). In order to evaluate the ability of the genes to distinguish between normal and tumor tissue samples, a group of 33 tissues was selected from an existing gene expression database composed of normal, benign, DCIS (ductal carcinoma in-situ), microinvasive, stage I, stage II, and stage III breast cancer samples. PCA of the 33 tissue samples indicated that the genes selected based on the smallest p-values classified 32 out of 33 tissue samples correctly, while one stage I tissue sample was misclassified as a normal sample. Accordingly, these genes can be used diagnostically to differentiate normal/benign samples from tissue samples containing intraductal or infiltrating ductal carcinoma of the breast.

[0053] In another study, the PCA based on this group of genes indicates that these genes may be used to differentiate between the different stages of breast cancer such as normal versus DCIS or DCIS versus microinvasive tissue samples as graphically shown in FIGS. 6 and 7. The DCIS sample that contained focal microinvasions was grouped with the Stage I and II tumor samples. This group of genes may be used to determine if a DCIS sample contains microinvasions.

Use of the Breast Cancer Markers for Monitoring Disease Progression

[0054] Molecular expression markers for breast cancer can be used to confirm the type and progression of cancer made on the basis of morphological criteria. For example, normal breast tissue could be distinguished from invasive carcinoma based on the level and type of genes expressed in a tissue sample. In some situations, identifications of cell type or source is ambiguous based on classical criteria. In these situations, the molecular expression markers of the present invention are useful.

[0055] In addition, progression of ductal carcinoma in situ to microinvasive carcinoma can be monitored by following the expression patterns of the involved genes using the molecular expression markers of the present invention. Monitoring of the efficacy of certain drug regimens can also be accomplished by following the expression patterns of the molecular expression markers.

[0056] In addition to the different disease progression stages which have been shown in FIGS. 6-7, as shown in the examples below, other developmental stages can be identified using these same molecular expression markers. While the importance of these markers in development has been shown here, variations in their expression may occur at other times. For example, variation in the expression level of one or more of the marker genes identified herein may be use to distinguish benign stages of breast cancer from malignant states.

[0057] As described above, the genes and gene expression information provided in Tables 1-5 may also be used as markers for the direct monitoring of disease progression, for instance, the development of breast cancer. For instance, a breast tissue sample or other sample from a patient may be assayed by any of the methods known to those of skill in the art, and the expression levels in the sample from a gene or genes from Tables 1-5 may be compared to the expression levels found in normal breast tissue, tissue from breast cancer or both. Comparison of the expression data, as well as available sequence or other information may be done by researcher or diagnostician or may be done with the aid of a computer and databases as described herein.

[0058] For instance, methods of this invention may use the 35 gene group (profile) composed of genes expressed in myoepithelial cells and basal lamina components in Table 3. The absence of both myoepithelial cells or basement membrane components usually indicates that the intraductal carcinoma is invasive. This group of 35 genes listed in Table 3 may be used to determine if myoepithelial and/or basal lamina components are present in a tissue sample. It includes 23 genes exhibiting a fold change of 3 fold or higher and 12 genes displaying a change of less than 3 fold. This group of 23 genes was used to distinguish between normal and tumor samples for a group of 33 tissue samples. In this study, the 23 genes were able to classify 32 out of 33 samples correctly and 26 out of 28 samples used to isolate this subgroup of genes. This group of genes can be used to identify the various stages of ductal carcinoma tissues more discretely than the 50-gene set. The study also demonstrates that this group of genes can differentiate between DCIS and a cribiform type of DCIS that is more prone to microinvasion. Clinically, the ability to discern DCIS with microinvasions or phenotypes prone to microinvasions such as the cribiform type would allow subgrouping of the samples containing microinvasions as a type of patient that should be treated more aggressively than DCIS patients lacking this gene expression fingerprint. A subclass of DCIS (cribiform type) based on the gene expression fingerprint may be subgrouped as a micro invasive sample based on the gene expression pattern associated with this sample.

Use of the Breast Cancer Markers for Drug Screening

[0059] According to the present invention, potential drugs can be screened to determine if application of the drug alters the expression of one or more of the genes identified herein. This may be useful, for example, in determining whether a particular drug is effective in treating a particular patient with breast cancer. In the case where a gene's expression is affected by the potential drug such that its level of expression returns to normal, the drug is indicated in the treatment of breast cancer. Similarly, a drug which causes expression of a gene which is not normally expressed by epithelial cells in the breast, may be contra-indicated in the treatment of breast cancer.

[0060] According to the present invention, the genes identified in Tables 1-5 may also be used as markers to evaluate the effects of a candidate drug or agent on a cell, particularly a cell undergoing malignant transformation, for instance, a breast cancer cell or tissue sample. A candidate drug or agent can be screened for the ability to stimulate the transcription or expression of a given marker or markers (drug targets) or to down-regulate or inhibit the transcription or expression of a marker or markers. According to the present invention, one can also compare the specificity of a drug's effects by looking at the number of markers affected by the drug and comparing them to the number of markers affected by a different drug. A more specific drug will affect fewer transcriptional targets. Similar sets of markers identified for two drugs indicates a similarity of effects.

[0061] Assays to monitor the expression of a marker or markers as defined in Tables 1-5 may utilize any available means of monitoring for changes in the expression level of the nucleic acids of the invention. As used herein, an agent is said to modulate the expression of a nucleic acid of the invention if it is capable of up- or down-regulating expression of the nucleic acid in a cell.

[0062] Agents that are assayed in the above methods can be randomly selected or rationally selected or designed. As used herein, an agent is said to be randomly selected when the agent is chosen randomly without considering the specific sequences involved in the association of the a protein of the invention alone or with its associated substrates, binding partners, etc. An example of randomly selected agents is the use a chemical library or a peptide combinatorial library, or a growth broth of an organism.

[0063] As used herein, an agent is said to be rationally selected or designed when the agent is chosen on a nonrandom basis which takes into account the sequence of the target site and/or its conformation in connection with the agents action. Agents can be selected or designed by utilizing the peptide sequences that make up these sites. For example, a rationally selected peptide agent can be a peptide whose amino acid sequence is identical to or a derivative of any functional consensus site.

[0064] The agents of the present invention can be, as examples, peptides, small chemical molecules, vitamin derivatives, as well as carbohydrates, lipids, oligonucleotides and covalent and non-covalent combinations thereof. Dominant negative proteins, DNA encoding these proteins, antibodies to these proteins, peptide fragments of these proteins or mimics of these proteins may be introduced into cells to affect function. “Mimic” as used herein refers to the modification of a region or several regions of a peptide molecule to provide a structure chemically different from the parent peptide but topographically and functionally similar to the parent peptide (see Grant in Molecular Biology and Biotechnology, Meyers, ed., VCH Publishers (1995)). A skilled artisan can readily recognize that there is no limit as to the structural nature of the agents of the present invention.

Assay Formats

[0065] The genes identified as being differentially expressed in breast cancer may be used in a variety of nucleic acid detection assays to detect or quantify the expression level of a gene or multiple genes in a given sample. For example, traditional Northern blotting, nuclease protection, RT-PCR and differential display methods may be used for detecting gene expression levels.

[0066] The protein products of the genes identified herein can also be assayed to determine the amount of expression. Methods for assaying for a protein include Western blot, immunoprecipitation, radioimmunoassay. It is preferred, however, that the mRNA be assayed as an indication of expression. Methods for assaying for mRNA include Northern blots, slot blots, dot blots, and hybridization to an ordered array of oligonucleotides. Any method for specifically and quantitatively measuring a specific protein or mRNA or DNA product can be used. However, methods and assays of the invention are most efficiently designed with PCR or array or chip hybridization-based methods for detecting the expression of a large number of genes.

[0067] Any hybridization assay format may be used, including solution-based and solid support-based assay formats. A preferred solid support is a high density array also known as a DNA chip or a gene chip. One variation of the DNA chip contains hundreds of thousands of discrete microscopic channels that pass completely through it. Probe molecules are attached to the inner surface of these channels, and molecules from the samples to be tested flow through the channels, coming into close proximity with the probes for hybridization. In one assay format, gene chips containing probes to at least two genes from Tables 1-5 may be used to directly monitor or detect changes in gene expression in the treated or exposed cell as described herein. Assays of the invention may measure the expression levels of about one, two, three, five, seven, ten, 15, 20, 25, 50, 100 or more genes in the Tables.

[0068] The genes and ESTs of the present invention may be assayed in any convenient sample form. For example, samples may be assayed in the form mRNA or reverse transcribed mRNA. Samples may be cloned or not and the samples or individual genes may be amplified or not. The cloning itself does not appear to bias the representation of genes within a population. However, it may be preferable to use polyA+ RNA as a source, as it can be used with less processing steps. In some embodiments, it may be preferable to assay the protein or peptide expressed by the gene.

[0069] The sequences of the expression marker genes of Tables 1-5 are available in the public databases. Tables 1-5 provide the Accession numbers and name for each of the sequences. The sequences of the genes in GenBank are herein expressly incorporated by reference in their entirety as of the filing date of this application. (see www.ncbi.nim.nih.gov.

[0070] Additional assay formats may be used to monitor the ability of the agent to modulate the expression of a gene identified in Tables 1-5. For instance, as described above, mRNA expression may be monitored directly by hybridization of probes to the nucleic acids of the invention. Cell lines are exposed to an agent to be tested under appropriate conditions and time and total RNA or mRNA is isolated by standard procedures such those disclosed in Sambrook et al., Molecular Cloning—A Laboratory Manual, Cold Spring Harbor Laboratory Press, Cold Spring Harbor, N.Y. (1989)). In some embodiments, it may be desirable to amplify one or more of the RNA molecules isolated prior to application of the RNA to the gene chip. Using techniques well known in the art, the RNA may be reverse transcribed and amplified in the form of DNA or may be reverse transcribed into DNA and the DNA used as a template for transcription to generate recombinant RNA. Any method that results in the production of a sufficient quantity of nucleic acid to be hybridized effectively to the gene chip may be used.

[0071] In another format, cell lines that contain reporter gene fusions between the open reading frame and or the 3′ or 5′ regulatory regions of a gene in Tables 1-5 and any assayable fusion partner may be prepared. Numerous assayable fusion partners are known and readily available including the firefly luciferase gene and the gene encoding chloramphenicol acetyltransferase (Alam et al., Anal Biochem 188, 245-254 (1990)). Cell lines containing the reporter gene fusions are then exposed to the agent to be tested under appropriate conditions and time. Differential expression of the reporter gene between samples exposed to the agent and control samples identifies agents which modulate the expression of the nucleic acid.

[0072] In another assay format, cells or cell lines are first identified which express one or more of the gene products of the invention physiologically. Cells and/or cell lines so identified would preferably comprise the necessary cellular machinery to ensure that the transcriptional and/or translational apparatus of the cells would faithfully mimic the response of normal or cancerous breast tissue to an exogenous agent. Such machinery would likely include appropriate surface transduction mechanisms and/or cytosolic factors. Such cell lines may be, but are not required to be, derived from breast tissue. The cells and/or cell lines may then be contacted with an agent and the expression of one or more of the genes of interest may then be assayed. The genes may be assayed at the mRNA level and/or at the protein level.

[0073] In some embodiments, such cells or cell lines may be transduced or transfected with an expression vehicle (e.g., a plasmid or viral vector) containing an expression construct comprising an operable 5′-promoter containing end of a gene of interest identified in Tables 1-5 fused to one or more nucleic acid sequences encoding one or more antigenic fragments. The construct may comprise all or a portion of the coding sequence of the gene of interest which may be positioned 5′- or 3′- to a sequence encoding an antigenic fragment. The coding sequence of the gene of interest may be translated or un-translated after transcription of the gene fusion. At least one antigenic fragment may be translated. The antigenic fragments are selected so that the fragments are under the transcriptional control of the promoter of the gene of interest and are expressed in a fashion substantially similar to the expression pattern of the gene of interest. The antigenic fragments may be expressed as polypeptides whose molecular weight can be distinguished from the naturally occurring polypeptides. In some embodiments, gene products of the invention may further comprise an immunologically distinct tag. Such a process is well known in the art (see Sambrook et al., supra).

[0074] Cells or cell lines transduced or transfected as outlined above are then contacted with agents under appropriate conditions; for example, the agent comprises a pharmaceutically acceptable excipient and is contacted with cells comprised in an aqueous physiological buffer such as phosphate buffered saline (PBS) at physiological pH, Eagles balanced salt solution (BSS) at physiological pH, PBS or BSS comprising serum or conditioned media comprising PBS or BSS and serum incubated at 37° C. Said conditions may be modulated as deemed necessary by one of skill in the art. Subsequent to contacting the cells with the agent, said cells will be disrupted and the polypeptides of the lysate are fractionated such that a polypeptide fraction is pooled and contacted with an antibody to be further processed by immunological assay (e.g., ELISA, immunoprecipitation or Western blot). The pool of proteins isolated from the “agent-contacted” sample will be compared with a control sample where only the excipient is contacted with the cells and an increase or decrease in the immunologically generated signal from the “agent-contacted” sample compared to the control will be used to distinguish the effectiveness of the agent.

[0075] Another embodiment of the present invention provides methods for identifying agents that modulate the levels, concentration or at least one activity of a protein(s) encoded by the genes in Tables 1-5. Such methods or assays may utilize any means of monitoring or detecting the desired activity.

[0076] In one format, the relative amounts of a protein of the invention produced in a cell population that has been exposed to the agent to be tested may be compared to the amount produced in an un-exposed control cell population. In this format, probes such as specific antibodies are used to monitor the differential expression of the protein in the different cell populations. Cell lines or populations are exposed to the agent to be tested under appropriate conditions and time. Cellular lysates may be prepared from the exposed cell line or population and a control, unexposed cell line or population. The cellular lysates are then analyzed with the probe, such as a specific antibody.

Probe Design

[0077] Probes based on the sequences of the genes described herein may be prepared by any commonly available method. Oligonucleotide probes for assaying the tissue or cell sample are preferably of sufficient length to specifically hybridize only to appropriate, complementary genes or transcripts. Typically the oligonucleotide probes will be at least 10, 12, 14, 16, 18, 20 or 25 nucleotides in length. In some cases longer probes of at least 30, 40, or 50 nucleotides will be desirable.

[0078] One of skill in the art will appreciate that an enormous number of array designs are suitable for the practice of this invention. The high density array will typically include a number of probes that specifically hybridize to the sequences of interest. See WO 99/32660 for methods of producing probes for a given gene or genes. In addition, in a preferred embodiment, the array will include one or more control probes.

[0079] High density array chips of the invention include “test probes.” Test probes may be oligonucleotides that range from about 5 to about 500 or about 5 to about 50 nucleotides, more preferably from about 10 to about 40 nucleotides and most preferably from about 15 to about 40 nucleotides in length. In other particularly preferred embodiments, the probes are about 20 or 25 nucleotides in length. In another preferred embodiment, test probes are double or single strand DNA sequences. DNA sequences may be isolated or cloned from natural sources or amplified from natural sources using natural nucleic acid as templates. These probes have sequences complementary to particular subsequences of the genes whose expression they are designed to detect. Thus, the test probes are capable of specifically hybridizing to the target nucleic acid they are to detect.

[0080] In addition to test probes that bind the target nucleic acid(s) of interest, the high density array can contain a number of control probes. The control probes fall into three categories referred to herein as (1) normalization controls; (2) expression level controls; and (3) mismatch controls.

[0081] Normalization controls are oligonucleotide or other nucleic acid probes that are complementary to labeled reference oligonucleotides or other nucleic acid sequences that are added to the nucleic acid sample. The signals obtained from the normalization controls after hybridization provide a control for variations in hybridization conditions, label intensity, “reading” efficiency and other factors that may cause the signal of a perfect hybridization to vary between arrays. In a preferred embodiment, signals (e.g., fluorescence intensity) read from all other probes in the array are divided by the signal (e.g., fluorescence intensity) from the control probes thereby normalizing the measurements.

[0082] Virtually any probe may serve as a normalization control. However, it is recognized that hybridization efficiency varies with base composition and probe length. Preferred normalization probes are selected to reflect the average length of the other probes present in the array, however, they can be selected to cover a range of lengths. The normalization control(s) can also be selected to reflect the (average) base composition of the other probes in the array, however in a preferred embodiment, only one or a few probes are used and they are selected such that they hybridize well (i.e., no secondary structure) and do not match any target-specific probes.

[0083] Expression level controls are probes that hybridize specifically with constitutively expressed genes in the biological sample. Virtually any constitutively expressed gene provides a suitable target for expression level controls. Typical expression level control probes have sequences complementary to subsequences of constitutively expressed “housekeeping genes” including, but not limited to the β-actin gene, the transferrin receptor gene, the GAPDH gene, and the like.

[0084] Mismatch controls may also be provided for the probes to the target genes, for expression level controls or for normalization controls. Mismatch controls are oligonucleotide probes or other nucleic acid probes identical to their corresponding test or control probes except for the presence of one or more mismatched bases. A mismatched base is a base selected so that it is not complementary to the corresponding base in the target sequence to which the probe would otherwise specifically hybridize. One or more mismatches are selected such that under appropriate hybridization conditions (e.g., stringent conditions) the test or control probe would be expected to hybridize with its target sequence, but the mismatch probe would not hybridize (or would hybridize to a significantly lesser extent). Preferred mismatch probes contain a central mismatch. Thus, for example, where a probe is a twenty-mer, a corresponding mismatch probe may have the identical sequence except for a single base mismatch (e.g., substituting a G, a C or a T for an A) at any of positions 6 through 14 (the central mismatch).

[0085] Mismatch probes thus provide a control for non-specific binding or cross hybridization to a nucleic acid in the sample other than the target to which the probe is directed. Mismatch probes also indicate whether a hybridization is specific or not. For example, if the target is present the perfect match probes should be consistently brighter than the mismatch probes. In addition, if all central mismatches are present, the mismatch probes can be used to detect a mutation. The difference in intensity between the perfect match and the mismatch probe (I(PM)-I(MM)) provides a good measure of the concentration of the hybridized material.

Nucleic Acid Samples

[0086] As is apparent to one of ordinary skill in the art, nucleic acid samples used in the methods and assays of the invention may be prepared by any available method or process. Methods of isolating total mRNA are also well known to those of skill in the art. For example, methods of isolation and purification of nucleic acids are described in detail in Chapter 3 of Laboratory Techniques in Biochemistry and Molecular Biology, Vol. 24, Hybridization With Nucleic Acid Probes: Theory and Nucleic Acid Probes, P. Tijssen, ed., Elsevier Press, New York (1993). Such samples include RNA samples, but also include cDNA synthesized from a mRNA sample isolated from a cell or tissue of interest. Such samples also include DNA amplified from the cDNA, and an RNA transcribed from the amplified DNA. One of skill in the art would appreciate that it may be desirable to inhibit or destroy RNase present in homogenates before homogenates can be used.

[0087] Biological samples may be of any biological tissue or fluid or cells from any organism as well as cells raised in vitro, such as cell lines and tissue culture cells. Frequently the sample will be a “clinical sample” which is a sample derived from a patient. Typical clinical samples include, but are not limited to, breast tissue biopsy, sputum, blood, blood-cells (e.g., white cells), tissue or fine needle biopsy samples, urine, peritoneal fluid, and pleural fluid, or cells therefrom.

[0088] Biological samples may also include sections of tissues, such as frozen sections or formalin fixed sections taken for histological purposes.

Solid Supports

[0089] Solid supports containing oligonucleotide probes for differentially expressed genes can be any solid or semisolid support material known to those skilled in the art. Suitable examples include, but are not limited to, membranes, filters, tissue culture dishes, polyvinyl chloride dishes, beads, test strips, silicon or glass based chips and the like. Suitable glass wafers and hybridization methods are widely available, for example, those disclosed by Beattie (WO 95/11755). Any solid surface to which oligonucleotides can be bound, either directly or indirectly, either covalently or non-covalently, can be used. In some embodiments, it may be desirable to attach some oligonucleotides covalently and others non-covalently to the same solid support.

[0090] A preferred solid support is a high density array or DNA chip. These contain a particular oligonucleotide probe in a predetermined location on the array. Each predetermined location may contain more than one molecule of the probe, but each molecule within the predetermined location has an identical sequence. Such predetermined locations are termed features. There may be, for example, from 2, 10, 100, 1000 to 10,000, 100,000 or 400,000 of such features on a single solid support. The solid support, or the area within which the probes are attached may be on the order of a square centimeter.

[0091] Oligonucleotide probe arrays for expression monitoring can be made and used according to any techniques known in the art (see for example, Lockhart et al., Nat Biotechnol 14, 1675-1680 (1996); McGall et al., Proc Nat Acad Sci USA 93, 13555-13460 (1996)). Such probe arrays may contain at least two or more oligonucleotides that are complementary to or hybridize to two or more of the genes described herein. Such arrays my also contain oligonucleotides that are complementary or hybridize to at least 3, 4, 5, 6, 7, 8, 9, 10, 20, 30, 50, 70 or more the genes described herein.

[0092] Methods of forming high density arrays of oligonucleotides with a minimal number of synthetic steps are known. The oligonucleotide analogue array can be synthesized on a solid substrate by a variety of methods, including, but not limited to, light-directed chemical coupling, and mechanically directed coupling (see Pirrung et al., (1992) U.S. Pat. No. 5,143,854; Fodor et al., (1998) U.S. Pat. No. 5,800,992; Chee et al., (1998) U.S. Pat. No. 5,837,832).

[0093] In brief, the light-directed combinatorial synthesis of oligonucleotide arrays on a glass surface proceeds using automated phosphoramidite chemistry and chip masking techniques. In one specific implementation, a glass surface is derivatized with a silane reagent containing a functional group, e.g., a hydroxyl or amine group blocked by a photolabile protecting group. Photolysis through a photolithogaphic mask is used selectively to expose functional groups which are then ready to react with incoming 5′ photoprotected nucleoside phosphoramidites. The phosphoramidites react only with those sites which are illuminated (and thus exposed by removal of the photolabile blocking group). Thus, the phosphoramidites only add to those areas selectively exposed from the preceding step. These steps are repeated until the desired array of sequences have been synthesized on the solid surface. Combinatorial synthesis of different oligonucleotide analogues at different locations on the array is determined by the pattern of illumination during synthesis and the order of addition of coupling reagents.

[0094] In addition to the foregoing, additional methods which can be used to generate an array of oligonucleotides on a single substrate are described in Fodor et al., WO 93/09668. High density nucleic acid arrays can also be fabricated by depositing pre-made or natural nucleic acids in predetermined positions. Synthesized or natural nucleic acids are deposited on specific locations of a substrate by light directed targeting and oligonucleotide directed targeting. Another embodiment uses a dispenser that moves from region to region to deposit nucleic acids in specific spots.

Hybridization

[0095] Nucleic acid hybridization simply involves contacting a probe and target nucleic acid under conditions where the probe and its complementary target can form stable hybrid duplexes through complementary base pairing (see Lockhart et al., WO 99/32660). The nucleic acids that do not form hybrid duplexes are then washed away leaving the hybridized nucleic acids to be detected, typically through detection of an attached detectable label. It is generally recognized that nucleic acids are denatured by increasing the temperature or decreasing the salt concentration of the buffer containing the nucleic acids. Under low stringency conditions (e.g., low temperature and/or high salt) hybrid duplexes (e.g., DNA-DNA, RNA-RNA or RNA-DNA) will form even where the annealed sequences are not perfectly complementary. Thus, specificity of hybridization is reduced at lower stringency. Conversely, at higher stringency (e.g., higher temperature or lower salt) successful hybridization requires fewer mismatches. One of skill in the art will appreciate that hybridization conditions may be selected to provide any degree of stringency. In a preferred embodiment, hybridization is performed at low stringency, in this case in 6×SSPE-T at 37° C. (0.005% Triton x-100) to ensure hybridization and then subsequent washes are performed at higher stringency (e.g., 1×SSPE-T at 37° C.) to eliminate mismatched hybrid duplexes. Successive washes may be performed at increasingly higher stringency (e.g., down to as low as 0.25×SSPET at 37° C. to 50° C.) until a desired level of hybridization specificity is obtained. Stringency can also be increased by addition of agents such as formamide. Hybridization specificity may be evaluated by comparison of hybridization to the test probes with hybridization to the various controls that can be present (e.g., expression level control, normalization control, mismatch controls, etc.).

[0096] In general, there is a tradeoff between hybridization specificity (stringency) and signal intensity. Thus, in a preferred embodiment, the wash is performed at the highest stringency that produces consistent results and that provides a signal intensity greater than approximately 10% of the background intensity. Thus, in a preferred embodiment, the hybridized array may be washed at successively higher stringency solutions and read between each wash. Analysis of the data sets thus produced will reveal a wash stringency above which the hybridization pattern is not appreciably altered and which provides adequate signal for the particular oligonucleotide probes of interest.

Signal Detection

[0097] The hybridized nucleic acids are typically detected by detecting one or more labels attached to the sample nucleic acids. The labels may be incorporated by any of a number of means well known to those of skill in the art (see Lockhart et al., WO 99/32660).

Databases

[0098] The present invention includes relational databases containing sequence information, for instance for one or more of the genes of Tables 1-5, as well as gene expression information in various breast tissue samples. Databases may also contain information associated with a given sequence or tissue sample such as descriptive information about the gene associated with the sequence information, descriptive information concerning the clinical status of the tissue sample, or information concerning the patient from which the sample was derived. The database may be designed to include different parts, for instance a sequence database and a gene expression database. Methods for the configuration and construction of such databases are widely available, for instance, see Akerblom et al., (1999) U.S. Pat. No. 5,953,727, which is specifically incorporated herein by reference in its entirety.

[0099] The databases of the invention may be linked to an outside or external database. In a preferred embodiment, as described in Tables 1-5, the external database is GenBank and the associated databases maintained by the National Center for Biotechnology Information (NCBI).

[0100] Any appropriate computer platform may be used to perform the necessary comparisons between sequence information, gene expression information and any other information in the database or provided as an input. For example, a large number of computer workstations are available from a variety of manufacturers, such has those available from Silicon Graphics. Client-server environments, database servers and networks are also widely available and appropriate platforms for the databases of the invention.

[0101] The databases of the invention may be used to produce, among other things, electronic Northern blots (E-Northerns) to allow the user to determine the cell type or tissue in which a given gene is expressed and to allow determination of the abundance or expression level of a given gene in a particular tissue or cell. The E-northern analysis can be used as a tool to discover tissue specific candidate therapeutic targets that are not over-expressed in tissues such as the liver, kidney, or heart. These tissue types often lead to detrimental side effects once drugs are developed and a first-pass screen to eliminate these targets early in the target discovery and validation process would be beneficial.

[0102] The databases of the invention may also be used to present information identifying the expression level in a tissue or cell of a set of genes comprising at least one gene in Tables 1-5 comprising the step of comparing the expression level of at least one gene in Tables 1-5 in the tissue to the level of expression of the gene in the database. Such methods may be used to predict the physiological state of a given tissue by comparing the level of expression of a gene or genes in Tables 1-5 from a sample to the expression levels found in tissue from normal breast tissue, tissue from breast carcinoma or both. Such methods may also be used in the drug or agent screening assays as described herein.

Kits

[0103] The invention further includes kits combining, in different combinations, high-density oligonucleotide arrays, reagents for use with the arrays, signal detection and array-processing instruments, gene expression databases and analysis and database management software described above. The kits may be used, for example, to monitor the progression of breast cancer, to identify genes that show promise as new drug targets and to screen known and newly designed drugs as discussed above.

[0104] The databases packaged with the kits are a typically a compilation of expression patterns from human breast cancer tissue or cell lines and for gene and gene fragments as described herein (corresponding to the genes of Tables 1-5). In particular, the database software and packaged information include the expression results of Tables 1-5 that can be used to predict the cancerous state of a tissue sample by comparing the expression levels of the genes in the tissue or cell sample to the expression levels presented in Tables 1-5.

[0105] The kits may used in the pharmaceutical industry, where the need for early drug testing is strong due to the high costs associated with drug development, but where bioinformatics, in particular gene expression informatics, is still lacking. These kits will reduce the costs, time and risks associated with traditional new drug screening using cell cultures and laboratory animals. The results of large-scale drug screening of pre-grouped patient populations, pharmacogenomics testing, can also be applied to select drugs with greater efficacy and fewer side-effects. The kits may also be used by smaller biotechnology companies and research institutes who do not have the facilities for performing such large-scale testing themselves.

[0106] Databases and software designed for use with use with microarrays is discussed in Balaban et al., (2001) U.S. Pat. No. 6,229,911, a computer-implemented method for managing information, stored as indexed tables, collected from small or large numbers of microarrays, and U.S. Pat. No. 6,185,561, a computer-based method with data mining capability for collecting gene expression level data, adding additional attributes and reformatting the data to produce answers to various queries. Chee et al., (1999) U.S. Pat. No. 5,974,164, disclose a software-based method for identifying mutations in a nucleic acid sequence based on differences in probe fluorescence intensities between wild type and mutant sequences that hybridize to reference sequences. The object of the method is to predict regions or positions of mutation.

[0107] Without further description, it is believed that one of ordinary skill in the art can, using the preceding description and the following illustrative examples, make and utilize the compounds of the present invention and practice the claimed methods. The preceding working examples therefore, are illustrative only and should not be construed as limiting in any way the scope of the invention.

### EXAMPLES

### Example 1

### Preparation of Breast Cancer Profiles

Tissue Sample Acquisition and Preparation

[0108] The patient tissue samples were derived from female patients; the average age for the normal and tumor samples was 39 and 52 years respectively. They stem from three different ethnic origins (Caucasian, African-American, and Asian). Furthermore, all tissue samples from Infiltrating Ductal Carcinoa (IDC) patient samples were studied for cancer-related expression, as 85% of the breast cancer patients were afflicted with this form of the disease. The samples are composed of normal, benign, DCIS (ductal carcinoma in-situ), microinvasive, stage I, stage II, and stage III breast cancer samples.

[0109] Histological analysis of each of the tissue samples Was performed and samples were segregated into either normal or malignant categories. The normal tissue samples were acquired from neighboring tissue of patients suffering from one of the following disorders: macromastia, mild fibrosis, infiltrating lobular carcinoma, or infiltrating ducal carcinoma, however; each tissue was diagnosed as normal by histological analysis.

[0110] With minor modifications, the sample preparation protocol followed the Affymetrix GeneChip Expression Analysis Manual. Frozen tissue was first ground to powder using the Spex Certiprep 6800 Freezer Mill. Total RNA was then extracted using Trizol (Life Technologies). The total RNA yield for each sample (average tissue weight of 300 mg) was 200-500 μg. Next, mRNA was isolated using the Oligotex mRNA Midi kit (Qiagen). Since the mRNA was eluted in a final volume of 400 μl, an ethanol precipitation step was required to bring the concentration to 1 μg/μl. Using 1-5 μg of mRNA, double stranded cDNA was created using the SuperScript Choice system (Gibco-BRL). First strand cDNA synthesis was primed with a T7-(dT₂₄) oligonucleotide. The cDNA was then phenol-chloroform extracted and ethanol precipitated to a final concentration of 1 μg/μl.

[0111] From 2 μg of cDNA, cRNA was synthesized according to standard procedures. To biotin label the cRNA, nucleotides Bio-11-CTP and Bio-16-UTP (Enzo Diagnostics) were added to the reaction. After a 37° C. incubation for six hours, the labeled cRNA was cleaned up according to the Rneasy Mini kit protocol (Qiagen). The cRNA was then fragmented (5×fragmentation buffer: 200 mM Tris-Acetate (pH 8.1), 500 mM KOAc, 150 mM MgOAc) for thirty-five minutes at 94° C.

[0112] 55 μg of fragmented cRNA was hybridized on the human and the Human Genome U95 set of arrays for twenty-four hours at 60 rpm in a 45° C. hybridization oven. The chips were washed and stained with Streptavidin Phycoerythrin (SAPE) (Molecular Probes) in Affymetrix fluidics stations. To amplify staining, SAPE solution was added twice with an anti-streptavidin biotinylated antibody (Vector Laboratories) staining step in between. Hybridization to the probe arrays was detected by fluorometric scanning (Hewlett Packard Gene Array Scanner). Following hybridization and scanning, the microarray images were analyzed for quality control, looking for major chip defects or abnormalities in hybridization signal. After all chips passed QC, the data was analyzed using Affymetrix GeneChip software (v3.0), and Experimental Data Mining Tool (EDMT) software (v1.0).

Gene Expression Analysis

[0113] All samples were prepared as described and hybridized onto the Affymetrix Human Genome U95 array. Each chip contains 16-20 oligonucleotide probe pairs per gene or cDNA clone. These probe pairs include perfectly matched sets and mismatched sets, both of which are necessary for the calculation of the average difference. The average difference is a measure of the intensity difference for each probe pair, calculated by subtracting the intensity of the mismatch from the intensity of the perfect match. This takes into consideration variability in hybridization among probe pairs and other hybridization artifacts that could affect the fluorescence intensities. Using the average difference value that has been calculated, an absolute call for each gene or EST is made.

[0114] The absolute call of present, absent or marginal is used to generate a Gene Signature, a tool used to identify those genes that are commonly present or commonly absent in a given sample set, according to the absolute call. For each set of samples, a median average difference was calculated using the average differences of each individual sample within the set. The median average difference typically must be greater than 20 to assure that the expression level is at least two standard deviations above the background noise of the hybridization. For the purposes of this study, only the genes and gene fragments with a median average difference greater than 20 were further studied in detail.

[0115] The Gene Signature for one set of samples is compared to the Gene Signature of another set of samples to determine the Gene Signature Differential. This comparison identifies the genes that are consistently present in one set of samples and consistently absent in the second set of samples.

[0116] The Gene Signature Curve is a graphic view of the number of genes consistently present in a given set of samples as the sample size increases, taking into account the genes commonly expressed among a particular set of samples, and discounting those genes whose expression is variable among those samples. The curve is also indicative of the number of samples necessary to generate an accurate Gene Signature. As the sample number increases, the number of genes common to the sample set decreases. The curve is generated using the positive Gene Signatures of the samples in question, determined by adding one sample at a time to the Gene Signature, beginning with the sample with the smallest number of present genes and adding samples in ascending order. The curve displays the sample size required for the most consistency and the least amount of expression variability from sample to sample. The point where this curve begins to level off represents the minimum number of samples required for the Gene Signature. Graphed on the x-axis is the number of samples in the set, and on the y-axis is the number of genes in the positive Gene Signature. As a general rule, the acceptable percent of variability in the number of positive genes between two sample sets should be less than 5%.

Fold Change Analysis

[0117] The data was first filtered to exclude all genes that showed no expression in any of the samples. The ratio (tumor/normal) was calculated by comparing the mean expression value for each gene in the breast cancer sample set against the mean expression value of that gene in the normal breast sample set. For Table 2, genes were included in the analysis if they had a fold change ≧3 in either direction, and a p-value <0.05 as determined by a two-tail unequal variance t-test. Out of the ˜60,000 genes surveyed by the Human Genome U95 set, 802 genes were present in the overall fold change analysis

Expression Profiles of Genes Differentially Expressed in Breast Cancer

[0118] Using the above described methods, genes that were predominantly over-expressed in breast cancer, or predominantly under-expressed in breast cancer were identified. Genes with consistent differential expression patterns provide potential targets for broad range diagnostics and therapeutics. For simplicity, applicants examined known genes by hierarchical cluster analysis developed by Eisen and colleagues to determine if functionally related genes would cluster together (see Eisen, et al. Proc Natl Acad Sci USA 95, 14863-14868 (1998)).

[0119] Table 2 lists the genes determined to be differentially expressed in cancerous breast tissues compared to normal breast tissue, with the fold change value for each gene. These genes or subsets of these genes comprise an overall breast cancer gene expression profile.

[0120] The well-characterized proliferation marker for breast cancer KI-67 had an average-fold change value of 2.8, which was calculated from 15 IDC tissue samples analyzed (see Gerdes, Semin Cancer Biol 1, 199-206 (1990)). As the fold change was below the present 3 fold criteria, the fold change value was not presented in Table 2. Some genes previously shown to be over or under expressed in breast cancer as indicated from the literature such as cytokeratins 5, 14, 15, 17, maspin, MMP 9 and 11, fibronectin, and pituitary tumor transforming 1, etc. are displayed in Table 2 as well as some genes such as p57(kip2), p63/p51/KET, mitosin, and pCDC55 whose expression levels were not previously known to vary in breast cancer.

[0121] The pituitary-tumor transforming 1 gene has been shown to produce in vitro and in vivo tumor-inducing activity (see Zhang et al. Mol Endocrinol 13, 156-66 (1999). In a recent publication, pituitary-tumor transforming 1 has been shown to be over-expressed in mammary adenocarcinomas (see Saez et al. Oncogene 18, 5473-6 (1999)). Also, another study discovered that all 48 colon carcinomas examined over-expressed PTTG1 as compared to normal colorectal tissue, and invasion of the surrounding tissue was associated with higher PTTG1 expression levels (see Heaney et al. Expression of pituitary-tumour transforming gene in colorectal tumours [see comments] Lancet 355, 716-9 (2000)).

[0122] Genes listed in Table 2, not reported in the literature to be over-expressed in human breast cancer tissues, include RAD2, FLS353, CKS2, cyclin-selective ubiquitin carrier protein E2-C, ZWINT, Lamin B 1 and H2A.X. Although FLS353 has been recently found to be over-expressed in colorectal cancer (see Hufton et al. FEBS Lett 463, 77-82 (1999)), differential expression of FLS353 in breast tumor cells had not been previously demonstrated.

[0123] Cyclin-ubiquitin carrier protein E2-C is another gene over-expressed in breast cancer, which was discovered in this study. Previous studies have shown that when a dominant-negative form of the protein is over-expressed, the mammalian cells arrested in M phase and evidence was provided indicating that this mutant form of cyclin-ubiquitin carrier protein E2-C blocked the destruction of both cyclin A and B (see Townsley et al., Proc Natl Acad Sci USA 94, 2362-7 (1997)).

[0124] The expression levels of the genes in Tables 4 and 5 are associated with various stages of infiltrating ductal carcinoma (Table 4) or infiltrating lobular carcinoma (Table 5). The Tables present the fold change value of expression in the particular disease state compared to normal breast tissue. The genes in these tables may be used alone, or in combination with those listed in Tables 1-3 in the methods, compositions, databases and computer systems of the invention.

### Example 2

### Diagnostic Subset of Breast Cancer Associated Genes

[0125] Table 1 lists the members of a diagnostic subset of genes selected by p-value. This group of genes can be used to differentiate between normal/benign and breast tumor tissue samples including two DCIS samples. Assays using these genes are capable of distinguishing between normal and tumor samples with near 100% efficiency (see FIG. 6). Only 1 of the 33 samples shown was misclassified as a normal sample based on the gene expression profile when this set of genes was used to analyze the 33 sample set (see FIG. 7).

[0126] FIGS. 6 and 7 are three-dimensional plots displaying the relationship of variance derived from gene expression data obtained from patient samples. In FIG. 6, normal tissue samples are displayed as darker spheres and the infiltrating ductal carcinoma tissue samples are the lighter spheres. The x-axis represents the first principal component that contains the greatest variance in data of 80%. The y-axis represents the second principal component of 4%. The z-axis represents the third principal component of 3%. FIG. 7 displays the results obtained from a separate 33 sample set which is composed of new samples that have no relation to the 28 sample set utilized to discover the gene set of Table 1. Again, the x, y, and z-axes represent the first (63%), second (10%), and third principal components (6%), respectively.

[0127] The gene set of Table 1 can thus be used to distinguish normal from cancerous breast tissue.

### Example 3

### Myoepithelial and Luminal Cell Marker Genes Examined on a Global Scale

[0128] Previous studies have indicated that myoepithelial cells express both epithelial and smooth muscle gene expression markers while luminal epithelial cells fail to express these genes (see Lazard et al., Proc Natl Acad Sci USA 90, 999-1003 (1993)). Cluster analysis identified a group 35 fragments representing 31 genes into one highly correlative cluster and the combination of genes and ESTs are listed in Table 3.

[0129] Previous studies have indicated that calponin and myosin heavy chain are expressed in smooth muscle cells and myoepithelial cells while luminal epithelium lack the expression of these genes. Furthermore, the proteins are usually not expressed in invasive ductal carcinoma of the breast (Lazard, et al., supra). Both calponin (fold change −11) and myosin heavy chain (fold change −10.8) were under-expressed in IDC. As indicated in Table 3, other genes associated with smooth muscle that were under-expressed such as smooth muscle gamma-actin, myosin light chain kinase, myosin, heavy polypeptide 11, and Leiomodin 1 and both mysoin polypeptide 11 and leiomodin 1 have not been previously reported to be under-expressed in breast cancer as compared to normal tissue samples.

[0130] The expression pattern represented in this particular cluster indicates that a preponderance of tissue samples diagnosed as infiltrating ductal carcinoma exhibit a luminal phenotype while myoepithelial cells were absent. More evidence to support this finding includes the under-expression of cytokeratins 5, 14, 15, and 17 in the tumor samples as shown in Table 3. Normal myoepithelial cells express cytokeratins 5, 14, 15, and 17 and breast carcinoma cells do not (Trask et al. Proc Natl Acad Sci USA 87, 2319-2323 (1990)). A previous study has indicated that myoepithelial cells are present in normal, benign lesions, grade I infiltrating ductal carcinoma but are absent in carcinomas of grades II and III (Gusterson et al. Cancer Res 42, 4763-4770 (1982)).

[0131] In addition, components of the basal lamina such as laminin were under-expressed in the infiltrating ductal carcinoma relative to normal tissue samples (Table 3). Both laminin S B3 and laminin-related protein were under-expressed as indicated in Table 3. It has been reported that myoepithelial and basal lamina markers are useful in differentiating microinvasive from ductal carcinomas of the breast (Damiani et al. Virchows Arch 434, 227-234 (1999)).

[0132] The set of 35 fragments representing 31 genes as shown in Table 3 could distinguish between intraductal carcinoma and microinvasive DCIS tissue samples based on the disappearance of genes expressed in either basal lamina or myoepithelial cells. There is evidence in the literature that the collapse of the basement membrane as well as the disappearance of an intact myoepithelial cell layer occurs during the invasion process. A multi-gene screen utilizing either of these sets of genes can be used to differentiate between benign and invasive breast neoplasm based on the gene expression fingerprint elucidated in this study.

[0133] FIG. 8 shows the results of PCA of the 91 sample set with all 35 fragments (representing 31 genes and ESTs) in Table 3. These results demonstrate that PCA using the genes in Table 3 is able to distinguish between non-invasive and invasive breast tissue samples. FIG. 8 provides evidence that this group of genes is diagnostically useful for differentiating DCIS samples that are intraductal (non-invasive) from those containing microinvasion. As shown in FIG. 8, this group of genes and ESTs is capable of differentiating between two subtypes of DCIS and may constitute a set that is a more sensitive predictor of a microinvasion phenotype.

### Example 4

### Discovery of Breast Tissue Specific Genes in IDC

[0134] Electronic northern (E-northern) analysis determines if a gene of interest is present in a tissue from a database of gene expression information, and if it is present, then at what levels. Expression levels were determined using a GeneChip set that evaluated the expression levels of 60,000 genes in each type of tissue from 28 different normal human tissues. Similar to multi-tissue northern blot analysis, E-northern analysis quickly determines if a gene of interest is expressed in a particular tissue type and also at what level. E-northern analysis of multiple tissue samples can be evaluated and the determination of exactly how many samples of a particular group that express the gene of interest is tabulated and statistical analysis can be implemented. Multiple samples from the same tissue are not available at this time using conventional multi-tissue northern blot analysis.

[0135] The E-northern analysis can be used as a tool to discover tissue specific candidate therapeutic targets that are not over-expressed in tissues such as the liver, kidney, or heart. These tissue types often lead to detrimental side effects once drugs are developed and a first-pass screen to eliminate these targets early in the target discovery and validation process would be beneficial. Furthermore, different tissues have very unique gene expression profiles related to parameters such as proliferation, differentiation, or cell types contained in the tissue that can provide interesting clues into the biological roles of the ESTs.

[0136] E-northern analysis was performed for many of the genes clustered in Table 2. Analysis of the E-northerns revealed that most of the genes were expressed at elevated levels in the thymus. There is high rate of mitosis present in the thymus during T-lymphocyte maturation and many proliferation-associated genes are expressed at elevated levels such as CDC2, cyclin B1, and topoisomerase II alpha. FIG. 1 displays the E-northern analysis for topoisomerase II alpha indicating elevated levels of expression in the thymus as compare to the other tissue types detected. FIG. 2 shows the results of an E-Northern analysis of transcription factor ICBP90, implicated to be involved with topoisomearse II alpha expression. ICBP90 was also expressed at high levels relative to the other tissue types in the thymus (FIG. 2). A study by Hopfner et al. indicated that adult thymus and fetal thymus contained the highest levels of ICBP90 using a 50-tissue RNA dot blot protocol (Hopfner et al. Cancer Res 60, 121-128 (2000)). Most of the genes contained in this cluster contained the highest levels of expression in the thymus.

[0137] FIG. 3 shows the results of an E-Northern analysis of the monocarboxylate transporter 4 (MCT4; formerly known as MCT3) which was grouped with genes associated with proliferation. MCT4 is most evident in cells with a high glycolytic rate such as muscle, white blood cells, and tumor cells (Halestrap et al., Biochem J 343 (Pt 2), 281-299 (1999)). A group of multi-tissue northern blots from a recent publication indicate that MCT4 is expressed at high levels in leukocytes but also other tissue types as well (Price et al., Biochem J 329, 321-328 (1998)). Furthermore, electronic-northern analysis indicated high levels of MCT4 were expressed in blood and white blood cells (FIG. 3).

[0138] A previously uncharacterized gene only expressed in breast tissue was identified from this study and an E-Northern analysis of the expression pattern of this gene is shown in FIG. 4. The distribution pattern of the expression of the gene shows it be used as a marker for breast cancer. The E-northern analysis only displays tissues where the gene of interest is present at detectable levels and breast tissue was the only tissue that this particular gene was under-expressed by −4.2 fold in IDC making it particularly useful as a diagnostic marker.

[0139] Another gene that may be used as a diagnostic marker that was not present in a particular cluster is the secreted frizzled-related protein 1. This gene was under-expressed in IDC by −17.7 fold, and the E-northern analysis shown in FIG. 5 indicates that it was expressed at greatest levels in breast tissue as well as in the cervix. Using the combination of clustering, fold-change analysis, and E-northern analysis on microarray data one skilled in the art can readily select additional therapeutic and diagnostic markers.

[0140] Although the present invention has been described in detail with reference to examples above, it is understood that various modifications can be made without departing from the spirit of the invention. Accordingly, the invention is limited only by the following claims. All cited patents and publications referred to in this application are herein incorporated by reference in their entirety.

LENGTHY TABLE REFERENCED HERE
US20070015148A1-20070118-T00001
Please refer to the end of the specification for access instructions.

LENGTHY TABLE REFERENCED HERE
US20070015148A1-20070118-T00002
Please refer to the end of the specification for access instructions.

LENGTHY TABLE REFERENCED HERE
US20070015148A1-20070118-T00003
Please refer to the end of the specification for access instructions.

LENGTHY TABLE REFERENCED HERE
US20070015148A1-20070118-T00004
Please refer to the end of the specification for access instructions.

LENGTHY TABLE REFERENCED HERE
US20070015148A1-20070118-T00005
Please refer to the end of the specification for access instructions.

LENGTHY TABLE
The patent application contains a lengthy table section. A copy of the table is available in electronic form from the USPTO web site (http://seqdata.uspto.gov/?pageRequest=docDetail&DocID=US20070015148A1) An electronic copy of the table will also be available from the USPTO upon request and payment of the fee set forth in 37 CFR 1.19(b)(3).

The application's sequence listing, which the Patent Office published only in electronic form, follows.

SEQUENCE LISTING (1246 sequences)

SEQ ID NO: 1 - DNA, 608 bp, Homo sapiens
  Genbank Accession No. AA001250
  misc_feature (1)..(608): n = a or c or g or t
atcaggaaaccagcacttcttacaactgccagttttaaaagaggaaatgattctgagatgtgctcattttattttaatttggtggttggtggttttccaagtagtctgtaaaatcctgcaagattcacagtctctggtgtgaaacctcagaagtgagtcgttgtgagcctgtggnagcaccaccaaggcaggctaaggggagggtgcagtaagtggagtttgtgaggctgagtggctgaggaagggagcaagtgcaacaaaatacgggctagagaagaaccagccaaggacgtggaacccactgctgctctcagagattcacggaacacggcagccttctgcaaggcagttccatgcatgtgcactcacgctgcaatcacagatgtcccagtaattaacctttctaagtcttgtgaatgctgactgcactttcacctcctcgaaaagccattggaagtttttagagcagcagcagccacagtttgtaagacaaatgtagagggggacgcaaaagaaaagacaccaccaggaggaggattcagtgtgcagtcagcacagaccaacatcaaccaaggcaatggctgccctccactcttggggaagatggg

SEQ ID NO: 2 - DNA, 665 bp, Homo sapiens
  Genbank Accession No. AA004208
  misc_feature (1)..(665): n = a or c or g or t
aacagtagacgggctaaggtttatttacttacttaacatttaaaaataattcatttgcttcaacaacatggcagacaatcaagagtactattgaaacataattcagagagggtcaggacaggaaagatcacaacctcattcctgaggtggaatgaaagatctaagccaggcctccatcctaggccaggctcctccattaagcagagacaaccaaaagataagaaagcctcggcctcatccccatcaggagatagcctgaactgctcacaaataagaaacaacttgaccagactgaggactggttcctgatgagtcaataggaaagtcagttggttctctcttcagtaggtgacttagcacccttcttggagaacatagagtagtagtctggacctggaggctaaggcccacatccaacaaaggttacctttctttttcagtaacgctttgttccttttttcaacagccagaaacctgaaatccagaggaagtcatttaaaaaaaccccttctggctgcaacctgaaagcatctcccaagcnagactggggggtagagatgatggctcccacttcggtnggcctcttcttcgatagggggagcagccagagaagaagctggtttttgntggccagagccggtttcttttcttccngggagcctggt

SEQ ID NO: 3 - DNA, 509 bp, Homo sapiens
  Genbank Accession No. AA004622
  misc_feature (1)..(509): n = a or c or g or t
cttaagcttcagttacatatggccaaatttaatggcactgaaaaggctaacatattaagatggaaaaaatttacaagtaatataaacattataatctcaattttgtttttaaaaataacataactttacaggttaggataaaatgcaccaaatttaacagtgattacctgaaggtaacagaatcatagcaatctttattttttccttgcgtacatttttatgatatatacagtattttttcataatcagaaaaaaaggcttgaaatttataatttttaaaaagcctctcctacaaataagcacatgaaaaaaatgttcaccatcaacagccattagataaatacaaattaaaaccacaatgaggtattactacacacatatgnaaaatgggcgaaaataanaaaaatggncaacatccaatgggctagcaagggtatggaggaaccagattattcggacattngctggtaggaatgtaaaccggtntggacactctgggggaaaaactn

SEQ ID NO: 4 - DNA, 462 bp, Homo sapiens
  Genbank Accession No. AA007367
  misc_feature (1)..(462): n = a or c or g or t
acttgacaaaattttactttagcccttgcatctccctgccaggctgccggacagctcccccgacacccaacccaggaggcagcctgatcccaccttgtgctttggtaggggacatccctcacccctctctcccaggagaccagggccaacgtaccttgagagtctgtaaacctacgccaggactggggttaacaccccagcccaccagctgagtctgccaggacacggggctctgggaagctctgaacccctcccatgccccagatcctgtgccacccacacccacaccactcaggactctggaaggaggtgagcggggaccataccaagancccagaggtgcctgttggagagcagggcttgcttggggggaagacaatgaagcagccaaggatccctctcgaggggctctgtctctggctgtgcttctccagcccaagctgcccctctccccgggggcag

SEQ ID NO: 5 - DNA, 555 bp, Homo sapiens
  Genbank Accession No. AA007390
  misc_feature (1)..(555): n = a or c or g or t
aatttgattaaaattatctagcattctttatatgtttttagagacagcgtctcactctgtcatctaggctacagtgcagtggtgcaatcatggctcactgcagccttaacctcgtaggctcaagtgatcctcctgagtagcacaagtgtgtgctaccatgcttggctagttctttaatacttttgtagagacaaggtctcactagaccaggctggtctcaaactcctggcctcaagccatcctcctcggcctcccaaaatgctggaatnataggcctgagcatgtgcacctagccaaagttgtctatgcagttcaaccangctgctctttgaacctgcccccgcttccccatttcccctacttttcaaatatccaaccccacgttaattggctgttatgctatttcagcctntatgaccctgggtaggcaggtgcaatnccatttgtacccatgagggagctgaaagctcaaaactagagcagtttgctnaagttcanccagcttagtangactgggattaggacttaggnctgctggnttcaggttcagttcng

SEQ ID NO: 6 - DNA, 647 bp, Homo sapiens
  Genbank Accession No. AA015613
  misc_feature (1)..(647): n = a or c or g or t
tttttttcagttctaagacatttcactttatttaaaagaagccaatatacaggatataaagggcatgatatttacaacagtacagtaaacaggttggtttccggtagatcagtagtctttccatgagtataaatcccccccttccctgtgatgctagacccagctggcagacaacagcaacggtggggcaggatcatggggtataaagtctccctgggtggggctaaaaatcaggtagatgcaaaaacatccacaaggggtcttgcagggaagggctttgctcatttctttgagggcttgggagggaagggtcttggtgagggatttgctcagaactaacacacagcccaccctgagcctggaaatcatccattcatagaaaattcccttccagagagaatctggctttacctgcacccacccagtcccctccagactccccactccaggagagagctcttctagagccagagcttggtgtctcaagggggaagaccctgtcctaggaaacccccagcacctgattcntcccccaggccctggggaacatagcaagatgcagccagcttgctgagtagcacnccggctggctatganatttagcattcatttgtcagtgctgacactggaccnaagccagtcaagaa

SEQ ID NO: 7 - DNA, 498 bp, Homo sapiens
  Genbank Accession No. AA017070
  misc_feature (1)..(498): n = a or c or g or t
tgagcaagtgatgacacagatgagtatttctttgtccattctgtagaatgtgtcctgggaatgtgtgcgggctatggcggttctattgtttggggaaactctttgtcagtacttctgtctgaggttttaccacgcccctcctattttaggtttccacatccaataaataccgtgatgtacgcagtctcgctaaatctaactctgcttagtcgaaaaggtttctgttgactcatgtgaatatgcatcagaggaaaacagtgacaacattaattggcagaaagccaaacctacccaaaagtttccgcattttctataaatgatgaacaaaataatgaatggaaaagtccctctatattttatcaatttggacgaatgccaaaatgcagatcaatcatttcattaagtacattcaccttctcgctccactgggaagggaatcacttaacagcataaagaaaacattactgaaaattatctctagtgtgataaggagggggn

SEQ ID NO: 8 - DNA, 341 bp, Homo sapiens
  Genbank Accession No. AA019424
  misc_feature (1)..(341): n = a or c or g or t
taacacttacgtttaccagtttattatataataaaggatatgataaggatacagatggacagccagaggaagaggtacatagggcaaggtccgaaagcagaacaggcataggaacttctgtccctgtggagttggggtgcaccaccctcccatcacgcggatgtgttcacccacccagaagttctccaaaccctgtacttcagggacttttatggaggcttcatcatgtaggcatgattcattattaactcaatctccagaagttccaagcttctaatcatggccttgggccttcccccgagaacaggcccccatcctaaagagcccaccgagnagtcatt

SEQ ID NO: 9 - DNA, 626 bp, Homo sapiens
  Genbank Accession No. AA020743
  misc_feature (1)..(626): n = a or c or g or t
taacaaaaaaaccaaactttacttgcatttagccattaataaataatttacagtatgtacacgcggtgacactccacacaggtcgcagnacgtggacgcagtgaggggtccccacttccaagcagaacgtgagcaaacacaaccaaaataaagtgcttcactttttacttccaacatagggaccaactaaaaccagcangnngagggaggggccgggccannngcnccctcccacccgcccacacacggttctggcagagggagcaggacctcttgnngggatngggnananacacgttctgcagcctcctggccagtgtatganaggtccctggggaacagcagaggggctgccgatgggtgggtagggtgtggagctgtagggcttgctggcaggatcacccntccagggcctggctgcactttttgggagtgaagcctggctttgtgctgtgggcatagcagcacaggtgggactgttcttgggccctggaatgagcaccctgggctgaaatgaagccggnaaacngaaangtctctcctggctgtgtggccaaaggcntaaggaaaagatagaggttganacctgccangatctcanactgagatcctaaaccttgtctntc

SEQ ID NO: 10 - DNA, 479 bp, Homo sapiens
  Genbank Accession No. AA026429
  misc_feature (1)..(479): n = a or c or g or t
cacgtattgtgtttagttctttgaaaacataaaagcctgcaatttctcgacaaaacaacacaagattttttaaagatggaatcagaaactacgtggtgtggaggctgttgatgtttctggtgtcaagttctcagaagttgctgccaccaactctttaagaaggcgacaggatcagtccttctctcgggttctggcccccaaggtcagagcaagcatcttcctgacagcattttgtcatctaaagtccagtgacatggttccccgtggtggcccgtgnaagcccgtgnattggcgtggctcaagctgtcttgttgaagttgttgcaaggaaaagaggaaacatctcgggcctnagtttcanaccctttggcctcaaaagccattccccanccaggactggcttaagcgtnttgagatnccgcgttgnaaaagtnctctggcccacgaggangcaagggagttngggggccacgccgaaan

SEQ ID NO: 11 - DNA, 386 bp, Homo sapiens
  Genbank Accession No. AA027103
  misc_feature (1)..(386): n = a or c or g or t
ttttttttttcaggctgtttaattttattaaaaggttcaaatttgatgataaatggtggcatggttacttcaagcttcggatacaagacctgctcagccgtggacatatcatcgacacccactgccatccccaccaggagctcccccaaccctgatgtagtctgagaccgtaaataatgtaatgatttcttgtactttggtaaatatgccaggaacacttgtagctgtctgagagctacagagaatactaacttggtgggctttttttttttttaagaggaaggatgggtaataagtggaagcaatttcagcaggctgactgaaccccacacagtctcaggganggaaaaggggcttnccctctggaaanccatcatttaacntca

SEQ ID NO: 12 - DNA, 627 bp, Homo sapiens
  Genbank Accession No. AA029437
  misc_feature (1)..(627): n = a or c or g or t
tttttttttttaccattgagtcagactagaagggactgacagggcattaaatactgtgggataggagcagggtcnggggaggggtatacaaaacagggcagaggggaggggactgaaaattgtnggtncngnnggnnnnnnnannnctggnccccccagcatcaggngcttatnatctnatnggtggcaacagagaccctgggatagacaggaggctggggcaggaggagaaatcggatgtgagaggctcccctcacgtcccccaagggctcctgggagtcgctggcattggagggtccagcccaaggncangggtgagggggtctttggttgggtgggttanctgcattgnccanctcccctganggannnccnnngnggccanntnnggtancggctcgncttntnggncnanatgccntntcccggncgggntttntccananaattntntctgaagagnatgcaaaaggtcctcctgcccgtgttcaaaatagaaaccggggtctgcaggctcanntcnngnntcctgctctctgnangntgctcttcatgtcctcatggggtgccgggctcanatnaanaaattnntggnaatggcgcaggnaccanggccaganttatggg

SEQ ID NO: 13 - DNA, 671 bp, Homo sapiens
  Genbank Accession No. AA029735
  misc_feature (1)..(671): n = a or c or g or t
caccaccttggccctggcacngcggcggctttctcagatgactgcgatttgccctctgctcaggacataaacagactcgtgggacttcagaacacatatatgggctatctggactaccggaagaaggccatcaaggaccttggcatcagccccagcacctgctctttcaatcctggtgtgattgttgccaacatgacagaatggaagcaccagcgcatcaccaagcaattggagaaatggatgcaaaagaatgtggaggaaaacctctatagcagctccctgggaggaggggtggccacctccccaatgctgattgtgtttcatgggaaatattccacaattaaccccctgtggcacataaggcacctgggctgggaatccagatgccagatattcggagcattttctgcaggaagctaaattactccactggaatggaagacataaaccttgggacttccctagtgttcacaacgacttatgggaaagctggtttgttcctgaccctgcaggatatttaaactcaatcaccatagctgatataactctacccttaaaatattccctggtatagaaatgtggaattgtcctttgtagccaactatacatngtccttatgaatataccttgataatatgatcacaatataaaaccaaaactctgtgtgcaan

SEQ ID NO: 14 - DNA, 512 bp, Homo sapiens
  Genbank Accession No. AA031286
  misc_feature (1)..(512): n = a or c or g or t
cataaataatgtactttattttattgcatatggctattaaggagggcatccatgatcaatactgactaaatacaatgcactattctagtccagtttattctcgtctccagcagcatcacattgacccctatatacagcgtgtacagtggaagacagagcaagataagttaagtctcttgtcatatcacaatagcaagaaatatatttaacatcttgatatccagaaacaatacgtacccaaaaagaaaacactgtttaataactgttaaagtttatatagcaaaaaatattttaaatttaaggtaagtcaggcaaaatgtacaaagacccaatatacattgtgaagttttagcaaacataacatttatacattttggttccattctgtaaactaaattaaaaatgtaaatattgcatatgcctttttgtgaaatgtacaggatagaggaaaatttagcatattatcatctgtggtattttgcntgttttaagctgcagtatgaacacgaacn

SEQ ID NO: 15 - DNA, 578 bp, Homo sapiens
  Genbank Accession No. AA031790
  misc_feature (1)..(578): n = a or c or g or t
cgtgaatggctctggcaagtgggggcatgggtggagtccataaggaaacctcagtctcaataacttcaaaatgttacttttcatggtaacttggtcatggagattggtcacagcacagacatttagaattttttagcaggttttttttttcttttgaatcttgtagtgctctctgggaattgcaccatgtacacttttacaacctacagaaatcngtcattattgttaaagtatctcaacttttctatttcttttattgtctattgtgcttttttgtttaaaaatacttttatagttttaaagtattgggccaaagtaagtattctcttgaagtctagtcaatttaaattgatccaaaaggttttcnggaatccccntttttaagttccaagaaattcnattataaatnagtggacctttaccaattcccattggtatnagcaaacagacaccttttagaaaaaggataagtaatcatcaatttggttttttttaaaaaaaaaccaatttctagactactaaatttggcataagaataatccttttaaaatgcacatcctttaattagttttttggga

SEQ ID NO: 16 - DNA, 446 bp, Homo sapiens
  Genbank Accession No. AA033764
gagctagcaagtttgatgtccttcttctgttccctattctaggtctgggcttgatgttcaccgattttccctcagctccgactgtggctcctctcagctgactctgaccctgctctcagccgggctgcatctgcccatctcagcacatcaataaacagcagagggaaactaccaccttggaaggagccaggcagtttctgctgggtaggccgcagctggaacatggaagtagcttcttccatcctacactggaaaccacccagcatcctgggccctccagagaagagccagactcccttccctgggaagagactatagtcctatcctgtatcctccgtggtcattgcccctcagtcacagcaatgaagagcaaattacctgttttctgtatgttcctctgacaacaactgccacagagtaaatatgaaaggttctggaaaaaagaa

SEQ ID NO: 17 - DNA, 588 bp, Homo sapiens
  Genbank Accession No. AA034289
  misc_feature (1)..(588): n = a or c or g or t
nttaataactactgatggtttgttcatgaaaaaaaatttttaaatcaaaagnntgtacttggccctgagttgaaaaaatttcaaaaatcaaaagtttgtacttggccctgagttgaaaaaaaaaattcacattctaagaataaacagaaaaatgttcttcttggaagtaaataacaaaagccatagtgttttcatttgtcttttcttcaggatacacggtagaagtcagagaatctttgatacttttatttggtgcaataatcaaggccatgcaacaacccaaaatcaagcattttggttcaagtcagggatgacatgagtggggacagaagctgtggcagtcattcaaataatctcatgggtcctgaggaanagacaggagttaacgtattaagtttctacttattatgcaggaactgtgttaaatattttacatangttttgantaatagctaacatttagctgagcaccaaatttgggccctgatttgtgctgggatctttcacagnttactggcttttaatcagcagtccttgtgagcnagggtatgatcattatccccatttntagattacngatgagattcg

SEQ ID NO: 18 - DNA, 591 bp, Homo sapiens
  Genbank Accession No. AA034418
  misc_feature (1)..(591): n = a or c or g or t
gtaaaatctgacaaggcgccaagatggtgactgtctcctctaaaccacgaaagagtaagatttgtgcaaccctcctcctcttccacctccttcaggagaattaaatgaatcaagactttggaaagactggggaagagccgggacttggcagtacttgaaacaggaggaatacaccagcctaaatgtacagactttgtagccgagcccactcgatcggtctgtgccttcacgtgaccaccatctgtgcctccctcgctccatccaaatttgtgtaggctgctccttggantactgcctaaaatatagctacaccagagccctggaaactgtagtcaagtaacaggcctcactgttttttttctttggattaaaagtgtatatctctctactgaggggtttccagctttacacttctataggttgttctgacagtgagaacacattatgtacatgtnttctattcatggtccagggcatgagaatcttaataatcctatacttcccctttttgcatgcagtatgtctggaatatggttataaaattttagcaaggggtgagattcaaggacaaaggtagagtgggtatttaag

SEQ ID NO: 19 - DNA, 571 bp, Homo sapiens
  Genbank Accession No. AA036952
  misc_feature (1)..(571): n = a or c or g or t
agaacaaaatatatnggtatttattaaacacatgtgacataggttataatatcaaagtagagcatgcatgaacagatgattcattcgtttaacaaaaacaccaattgatactgagaacactaaattattaaatttccaagacatataaaattctctttaagttaaagtgagaaagaaaaaaaaatcacaagttgaataaatacagtgatttcagctggtccaatgaaagcataaggcacaaattaaaccaagggactagcgcatcagaatgaagcttgtctggcccacacaagtctctcagtgtggctcccacgaccctgcacagatgcttggggaccaagaggaaagagcacctgcaggccgggaaccctcccttccaggttcaagtttggctgggtgcccatgcttcttgtggacaggcctctctgtatcagagaaacgctgcctctaatacttttatgggtaaacaaaaccttcatgctctatcaaacaatcctgggcatgaataacatggaacttcaaattaatgtccttttccctcccaaccaaagtctagcaaataantacttgn

SEQ ID NO: 20 - DNA, 551 bp, Homo sapiens
  Genbank Accession No. AA037766
  misc_feature (1)..(551): n = a or c or g or t
ntacattatggaaatttatncctcctgaatgtataaggcaggagactaattcaatatacattcactatgcagaattctacaagttctgggctatgtgtaaatgtgccccccttccctccattatcaggatgtttaaatgtgtttcctttttttcatttaaaactttgcttagatgttttacattgccatcacctcttcctgagaaaaaggtgtgtcccccaccccaacccctaggagccangcagactatcttnctgaggggccacaagcacactcccacngtggagaacaagggcagtggatgaagggaacggggatttttcaaactaatgttttccctcaaacaggcctcccggcgccngttagacttgaagcaatgacatctattaaaatggggaccccagctgggggttaagaatgttngtttaagaatgatgacgatatcttgaaaagaaattcttggctggggatggngtagggggaaagggaaaaaaattaattattttgactttcccattggcaatgcttgctacgtttaatctgattgcatt

SEQ ID NO: 21 - DNA, 488 bp, Homo sapiens
  Genbank Accession No. AA039324
  misc_feature (1)..(488): n = a or c or g or t
caaatctacaacattcagggctgaaactgcttttttttttcttcagtagttgcaaaagggaccagaattctatttccatttcaagcaaatatgccacttttaaatgcaagagaatgtcattactccttaccaaacaatctttctttctctctccttccttccctcccttctttccttccttccttctttccttncttccttccttncttccttncnttannncttccttccttcctgtctttctgtcttttctctctttcttttctcttttctctctttcctttctttctggctctttttcacccaggctggaagtgcaatgggcaagattatagctcactgcaagcctcaaactcctgggcccaagagatccttccgtttcagcctcctgagtagttgggaccacaggtatatgccaccacgcatgggctacatttgttttgttttggttttgtttaagagaaggatgtctcactaggtttctcagg

SEQ ID NO: 22 - DNA, 641 bp, Homo sapiens
  Genbank Accession No. AA044828
  misc_feature (1)..(641): n = a or c or g or t
gggctccagacaccccagagtctctttattgaggttcttagaaggcgagtgcaatctcagcctagggtagctgaaggaggtccagttcgtgtcaagtctgtgttcaggaagtaggtgcagagctgccctttgcctttcaccttgatgacaccccggctgtagcaggtgtagcccagggactgtagggcccatgctgtctcctcagtcacttggattttgccaaggactcctgtactctccatgcggctggccacgttcactgtgttgccccaaatgtcatattgcggcttctgggccccaataactccagctactacgggtccatggttcaaccccactcgcaggcggaagttgttgaatgaatgcttgttgatgacgtccagcttagaccccagggccacggcaaattccaccatagtgccaaggtggctgcagctccgttcagcatcctgttgtgcatcctgtccagangtggcatttaagcctgtggtgccatgtaggtgtgccgatggtcttgattttccacccactgaattgggttggaganagtcatcaaaacagcnattactcantgagcagctcagaantctaggcctcatgattgagttggatcaggtagaancttgaatctggatgagcga

SEQ ID NO: 23 - DNA, 590 bp, Homo sapiens
  Genbank Accession No. AA044830
  misc_feature (1)..(590): n = a or c or g or t
tttttcacaaatttaagtttggtttatatattttattgacatggttactcaatgtccacatcattccatctgcatcgtcttcctacaaacagtttttcttctactattcggttatttctcctttttttgtttcctatttcagaatcaaatttattttacttgcaaagtcagtggaatatggtttggaaccagtagggcctctaacttaagcccagaacctgtcaaagagaagtgcagtatcattgctaagacttgaacagtttatctctcagaatcttcagttcctttgaatntctcagctcttagtgtaatctgttttatgtgtttgttgtagacttccattatggatagatttccaaaataatttgggnaatcaactggtattttagcattctggtaactaacatgtttaaaaatctaaggctctttttcatgcaaaggagactnatttttgctttcaaaagcataggccggaaaccttangttcaaaggtagtanataatgctgagcaaattgcnagtgatgatacagctgcagttccgttggggaattgttggcncaggaccctagaaatgagaatcttagaattc

SEQ ID NO: 24 - DNA, 588 bp, Homo sapiens
  Genbank Accession No. AA045145
  misc_feature (1)..(588): n = a or c or g or t
tctgtgttcttttgacaatagcgtcattgccaagtgcacatcagtgagcctcttgaatctgtttagtctcctttttcaacaaaggagtgtgttcagaaaaggagagagaggctgagatcattcaggagtttgttgggcagcaagcatggagcttcttgcacaaattctgggtccataaacaacccccaaagtccctgctgatccagtagccctggaggttccccaggtagggagagccagaggtgccagccttcctgaagggccagaaaatttagcctggatctcctcttttacctgctaggactggaaagagccagaagtggggtggcctgaagccctctctctgcttgaggtattgcccctgtgtggaattgagtgctcatgggttggcctcatatcagcctgggagttatttttgatatgtagaatgccagatcttccagattaggctaaatgtaatgaaaacctcttaggattatctgtggagcatcagtttgggaagaattattgaattatcttgcaagaaaaaagtatgtctcactttttgttaatgttgctgcctcattgactgggaaaatgaanaaaaga

SEQ ID NO: 25 - DNA, 475 bp, Homo sapiens
  Genbank Accession No. AA046457
  misc_feature (1)..(475): n = a or c or g or t
tntggtaaaaggtcaaggtctcaaaatgctaaatgatgagggaaagtgtagcaagtatgattcaattctattaaaagacagaanaatcaaggtaggcacttgctcaaaactacgtgagtagtcagagaggagacacaaattagctttgggaactcccgagaactccaatgtgctccagtcaaaatcttttttaaaaggttcctttgtaaacattacccttcccccgatctctgtgaccaaggttgccacctgtgacatggatttgcagcctgcagtattgtacttcccctgcttggggccatctgtgctaggacatgatgatttttctatgaaagcagctgttctcaccatcacaaccagccttgaattggtggcacaacctggatccaaatagtggctctggagcaactgggaatagggcccggggaccatccacccaggtggcagcgctgggctnaagcaaaggggagtcagg

SEQ ID NO: 26 - DNA, 596 bp, Homo sapiens
  Genbank Accession No. AA046671
  misc_feature (1)..(596): n = a or c or g or t
ggatcacccttgtgagcaaaaaggcgaaccagcagctgaatttcacagaagctaaggaggcctgtaggtgctgggactaagtttggccggcaaggaccaagttgaaacagccttgaaagctagctttgaaacttgcagctatggctgggttggagatggattcgtggtcatctctaggattagcccaaaccccaagtgtgggaaaaatggggtgggtgtcctgatttggaaggttccagtgagccgacagtttgcagcctattgttacaactcatctgatacttggactaactcgtgcattccagaaattatcaccaccaaagatcccatattcaacactcaaactgcaacacaaacaacagaatttattgtcagtgacagtacctactcggtggcatccccttactctacaatacctgcccctactactactcctcctgctccagttccacttctattccacggagaaaaaaattgatttgtgtcacagaagtttttatggaaactagcaccatgtctacagaaactgaaccatttgttgaaaataagcancttcaagaatgaantctgggttggaggtgnccacggtctncagt

SEQ ID NO: 27 - DNA, 669 bp, Homo sapiens
  Genbank Accession No. AA046853
  misc_feature (1)..(669): n = a or c or g or t
tcatatccagcacaaaaactatttctggctgaatagcacagaaaagtattttaacctacctgtagagatcctcgtcatggaaaggtgccaaactgttttgaatggaaggacaagtaagagtgaggccacagttcccaccacacgagggcttttgtattgttctactttttcagccctttactttctggctgaagcatccccttggagtgccatgtataagttgggctattagagttcatggaacatagaacaaccatgaatgagtggcatgatccgtgcttaatgatcaagtgttacttatctaataatcctctagaaagaaccctgttagatcttggtttgtgataaaaatataaagacagaagacatgaggaaaaacaaaaggtttgaggaaatcaggcatatgactttatacttaacatcagatcttttctataatatcctactactttggttttcctagctccataccacacacctaaacctgtattatgaattacatattacaaagtcataaatgtgccatatggatatcagtacattctagttggaatcgtttctctgctagaattaggtgtgagatttttgttnccaggtatancaggcntatggttggtggcataaattggtctttaaatgcttggtggnctttgtaacagattnctctga

SEQ ID NO: 28 - DNA, 653 bp, Homo sapiens
  Genbank Accession No. AA056180
  misc_feature (1)..(653): n = a or c or g or t
ctgacttccacaatcctggctatcccaagtacctgggcaccccccacctggaactgtacttgagtgactcacttagaaacttgaacaaagagcggcaattccacttcgctggtatcaggtcccggctcaaccacatgctggctatgctgtcaaggagaacactctttactgaaaaccaccttggccttcattctggcaatttcagcagagttaatttgcttgctgttagagatgtagcactttatccttcctatcagtaactgctccgtgttcagactcctggtttcttccaggcttacagtggacatcatcagcttcctgctttaaaaaatatcttatgtccctaattgcctttcttttacctgactttgtcacctttgttgtctttgaattctttaggctgcatattattttacatgctttgttttgtcatgtatataccaggtattggttttatggtttaaacactatggatacaggggtttgttttgcacaattttaatagtcatgcactacataatgatgttttggtcaatgacagaccacgtatatgttggagctcataagattataatactggtattttactanactttctgggttggatacaaatncaatatgntcagtgctacagtatcagtgcagtacatgat

SEQ ID NO: 29 - DNA, 496 bp, Homo sapiens
  Genbank Accession No. AA056755
  misc_feature (1)..(496): n = a or c or g or t
tttttttgagctttcagagtggttttatcattaaattaatatctaatcacataattcaaagatataaaaattggaatgtagaaggtggggcaagcccctccctcaggactggaggcggcacagggacagagccgcactgaagcgggtgagcgtgcgagaaacatacagccgagcagntgccccgaacactcagtccagggtggaagcatcgccccggcaccccccaacccccgagcccactgcgcacccacaggaagagtgcaggcttttcacatttcagagggtggggtggggtggggtggggcggggtgggcccctggcttttggggctgccctccagcagccctggaaggacacaggcggtgatggtgggagaaaggccccctctcccaggggaggcctccttgtcctgagcttgggctnaggtctctgttccagtaacagatgctggtttttgttttgtttttttttttaagacaaggtntcgcctcgtgcc

SEQ ID NO: 30 - DNA, 660 bp, Homo sapiens
  Genbank Accession No. AA058578
  misc_feature (1)..(660): n = a or c or g or t
taatttctttttctgaggaacaaaattggccatttaaataaagttcttttctagtgagtaaagaggtttctcagagccagaaatcactgaaaagagagtctgtcgaccctgcccatggaaaagcccagagatttctctaaccacttcttgccaaacttcctagttttgtgattggatgtttcttggtttagcattgtttggtgctgaatacattttgcaattcttttgttctctgccctagagcttccattaccctggacttcaactcattaccaaattaaagaattcttttagaagatttcttttaagagtcaggtcacaacagaaagggcgccctcctgttctcctaaatctcaagggcatctcaggttgtgtctgctcttacgttgcaccttccttttgttcccttttaatgcagcagcacactgggctatagcagaggcagacctgatttgattatctgataccttttccacaaaaatcatatatcccctgcttccaggcccnactaatccaaataacatcttctagaacaacaggggaaagctcccagaaaggggtngaaaancctgtgacttcctggccagatccaccttgctncctgtcttcctaggggtcnaggtgttggagnatgtggaggagccccancaagggagnacc

SEQ ID NO: 31 - DNA, 523 bp, Homo sapiens
  Genbank Accession No. AA059396
  misc_feature (1)..(523): n = a or c or g or t
taaaatagctaaataaatctttaatatttctaattgcaaatgtacagaaattgcacagccacacagagtcttagaacaccaacagcttcctctgtacattattacatagttaaaagtcgcagctggagggaggagctccagcccaaactccaacgtttgcattttttccttttcacatacttacaaaagaggggagctgggacgcggtgtgggagctggggggctttgtggctgagtgtgtagaaaagagagaggctgtttccctggacagtctggctcccgcagtcgtgcgnncgcagggggaggtgtacctggggcanatgctctgggggaccggggcgtgtggagctgtaacctcggtcctccacccccantttctgggcantcggaaagagtcctcactgacaggaggtttggcagtntccatcacccagaacatggaagttgagcagaaaagtngtcatgcctctgtgtagcagggatngcgtggctnttccnacagagctgagttcgtgaccaaggg

SEQ ID NO: 32 - DNA, 607 bp, Homo sapiens
  Genbank Accession No. AA059401
  misc_feature (1)..(607): n = a or c or g or t
ctgatcatggcctttcaacccaacaagggcccttccctgctcttccaccagtaaaggctcctggcctctcatcaggatctgccccccagagacccccccagacactgcagggcctggtgatgctgtcctctgtaccggaaatggcaggcactgtcagatttccactcttctgcctttaggaaggctgggtgcttcttgctctgacagccagtctggggagatgactcttacgttgcttgagtcttggtggcaggctgctgtccacgggggagaagtctctgctctggactggacagaagagagacttttaccctggggcactcacacggccaagcttctgccaccacttcattagctgtattctccatagtatggtgaaatagcaggtgcgtcttctagtttattcctcctggggacatttcctcaaagcagttttgcgcccccgcaagaaatggtcagcctaagggtaatgtacagccgtgcttggagaaccatggaantacacccctacaggtgatactgtctgttttcaataaatacgagcggcgattncaccacaaaaaaaaaaaaaaaaagcggccgaanttattcctttgtanggtattta

SEQ ID NO: 33 - DNA, 572 bp, Homo sapiens
  Genbank Accession No. AA059458
  misc_feature (1)..(572): n = a or c or g or t
tgaaactcagtggctctatctaaccttactatctcctcactctttctctaagactaaactctaggctcttaaaaatctgcccacaccaatcttagaagctctgaaaagaatttgtctttaaatattttttaatagtaacatgtattttatggaccaaattgacattttcgactattttttccaaaaaagtcaggtgaatttcagcacactgagttgggaatttcttatcccagaagaccaaccaatttcatatttatttaagattgattccatactccgttttcaaggagaatccctgcagtctccttaaaggtagaacaaatactttctatttttttttcaccattgtgggattggactttaagaggtgactctaaaaaaacagagaacaaatatgtctcagttgtattaagcacggacccatattatcatattcacttaaaaaaatgatttcctgtgcaccttttggcactctcttttcaatgtgggaaaacttagtcaccctgaaacccacaaataaataaacttgtgatgtgggcagaggttggggtggcatgntgtgttaattaacc

SEQ ID NO: 34 - DNA, 598 bp, Homo sapiens
  Genbank Accession No. AA075632
  misc_feature (1)..(598): n = a or c or g or t
caattttggttacctcaatgagggagtggaggaggatacagtgctactaccaactagtggataaaggccagggatgctgctcaacctcctaccatgtacaggacgtctccccattacaactacccaatcccgaagtgtcaactgtgtcaggactaagaaaccctggttttgagtagaaaagggcctggaaagaggggagccaacaaatctgtctgcttcctcacattagtcattggcaaataagcattctgtctctttggctgctgctcagcacagagagccagaactctatcgggcaccaggataacatctctcagtgaacagagttgacaaggcctatgggaaatgcctgatgggattatcttcagcttgtttgagcttctaaagtttctttcccttcattctaccctgcaagccaagttctgtaagagaaaatgcctgagttctagctcaggttttcttactctgaatttagatctccagacncttcctgggcacnattcaatttaggcacaacatataccttccatgaagcacacacagactttttaaagcnaggacaatgactgcttgaatttangcctttnggaatnaagct

SEQ ID NO: 35 - DNA, 429 bp, Homo sapiens
  Genbank Accession No. AA079839
  misc_feature (1)..(429): n = a or c or g or t
tgcgggaaggaggtaggagtcaagtccaataaataagtgtaaaaatattcagtacatnggcatggttatttaatacaacagaatttgctctgagttggaaggacaggggtttcagcctatgtgtttatgatacaacaaagggacttttaggctgataaagttatggaacatgagacttcagtcttcttattaaatggccaaatggaccaagtgtttgcatgaaagctaatctttcctttcatgaaaaggaaattaaacccacttgctccccgaatgggatgattttcaggagtcctgagccatggttcctggcagaaagctggggggcctgtgncccttaaagccaggactgctggnccatcccaggccggttaattattatccagggaacgccctaaacattgcctcctttccngcaggtttcatggn

SEQ ID NO: 36 - DNA, 522 bp, Homo sapiens
  Genbank Accession No. AA081045
  misc_feature (1)..(522): n = a or c or g or t
tgtagacaggatctcactgttgcccaggcagtggcacaatctaggctcactgcaacctctgcctcctgggttcacacaattctcctgcctcagcctccctaatagctgggattacaggtgcctgccaccacactgggctaatttttgtattttttggtaaagatggggtttcacgatatcggccaggctggtctcaaactcctagcctctactgatccacccgcctcggcctctcaaagtgctgggattataggcataagccaccttgcccagcctccagacgcattttctatacaactctgcacaggcaatttttggcctcagagtcctccagcaggtggcagactccagcacaggaacaaaatctgtctacccccagaaaatctctttccaagttgacacagcctttcataaagcaagngccataactgtgatgaataccggttgtcattttaaagcactgcaagttattccacatgaatactgaacttgtggtccaagcatacaggggaatgcatcccc

SEQ ID NO: 37 - DNA, 567 bp, Homo sapiens
  Genbank Accession No. AA082546
  misc_feature (1)..(558): n = a or c or g or t
agagaagaccgtggatcacctggggacagaggtgaaaggcctgctgggctgctggaggagctggcctggaacctgcccccgggacccttcagccccgctcccgaccttctcggagatggcttctgagccctggagctggagcccagcagttggaggtggtgcacctgccaggcagcgccacagaaccagccctgtcctctcgacttccttccttagcttcatgtgaaataaaagctattctggtctcctctgtgtctgctgacagagtaacccgtttaactacagcctcctctcactccacttccatgcctggaggaagcctgcaaccccctccaggctcagacctggggacacccccantcctgtcatttataggggaagatggagcaggggttgattcacacagatggggggccctctgaattggcctgcttctcagaatgttggccataggtnaaaagcaaggggatcggggttcaggaccancagaatgtttagtgaatctgnatgaatgagaccccaggatttatgtgtccattaagtggttgttgtgntttaaaaaaaaaa

SEQ ID NO: 38 - DNA, 632 bp, Homo sapiens
  Genbank Accession No. AA101125
  misc_feature (1)..(632): n = a or c or g or t
ttataaaaactcaacacacattggattttaatgagaaaataactgtatacttgcattgaatgcctcacaatcactctaaaaccaaagcaggataataacatttaagtggttaacatacacaggaaaaccagatacagagtataatttccaaacacagtattgctgcttttntcccctcctcccccaaaaaaagaaaaacaaagaaaaaataatttgggtaaagagcaacacaaaatcaaaattggcagctcactgaatgcttaaaattcaggaaatttgttctttaactaaaatggaatatattcaccatctctaacacttaggctacttttttttcaatacatagtttaattaaatccattctttagttgggaaaaaaaaggtttaattatttgtcttcagagaccaagaatcnacactggttttagtggttccctgttacactttatatntatatatgnggtgtgtggtatatatatgtgggacattggatctatattacgggcctatatggncattggccaggggtgagcagcatgcatgggggtatgaagaggccagtaaactgcattgngtcatcccagtaaacncagcacggcctccgccactgacagnccggttccntaattccg

SEQ ID NO: 39 - DNA, 589 bp, Homo sapiens
  Genbank Accession No. AA102575
  misc_feature (1)..(589): n = a or c or g or t
tttgctttttatttttcggtttatttaatcttctttaacacagccattgttggttcaacaatccaatatttgaggttacattattgcaaaaataaggacatagctgaataggttatgccatcaatatgtttgttaatcctatcccttttattaaagacaaagcacagtttgttaatattgtcttggattaactctatttgtaaggttacttatagtggttcatactaaaggcaggggatttgcttcctgggccaattgtctttaaactataatttaagaaatcattagcattttgtaattaaaaacagataaagcaatattttagtacaatgttaggcagcagataaaattaccctgtctgaatatatgtgtacatatacataaaacgctagcatgctttaagaagttaagaaatattaatattctgtgaaattaatatgtaaatnaaatataatctggaatgaaattcccattatgtacaaaaaagagaaatagaatccttcacttccaaacctatagattttagcatcttatagccnacatcacatcactggatgtaagggttagtttaaattgaagagcnttaagt

SEQ ID NO: 40 - DNA, 588 bp, Homo sapiens
  Genbank Accession No. AA115300
  misc_feature (1)..(588): n = a or c or g or t
tttttttttttttttttttttttttcttagagcaaacaaaaaattttattagattatatacctgagcaatagaaaacttcgagataacattttaaaaatattgacacgttaaggagtattttactttcaaaataccataaaattgattttaaattccctttggaagaaaacatcccctagtctccttcactaaattacaaataattacccaaatataaaaaggacttgcaatgtttgttaaatatggacggcatgaagacaattaagaaactataggacttatttccaacaagaatacaatatgcatgaagttttgaaaatgtgactttttaccacagtttctgagagtgtaatagtactaaatgttctaaatgtaatctttcagatccacgagcggtgaaagtaatgctggtttggaaaatgaggttgatactccccgttaagcttctcagtgaatgggctgcttctgtttctaagctgcaggaacaaagcacctctatctataagcncataaacacacaactcaactatccagatactccggggccacaatctcaatctagggccgtaaaaattcaccaattgatg

SEQ ID NO: 41 - DNA, 588 bp, Homo sapiens
  Genbank Accession No. AA126704
  misc_feature (1)..(588): n = a or c or g or t
aaaaaaaaaacaatatatagtctttctgggatatcagcttctgcctaaattgtgagaggtggtgtttcaaaagacacacgcaccagtggccccggggagagctgcattccaggttcctgtcctacgtaggcccctacgggtgctggggacaccagtctcctccactcacttggcaggagtcaggactgtccacctcttcaactggcacaaggcccaagcagcatgggggccctgagtgaaatggagggtcccacactgcttccaggacaggactgtcgggggctctcctcacccctgactggcccacagcagcaggctgctcctggcgttggcagcagtcgtgatggggctgcagcagctggtgagtggagtcgtcgggcagtgtgtataagaaagagccctcgtccgggctagacttgggacccctcgtgatctggtgactttgggggtcatatccattgccaagatgggtctgcctcagcaggctgctggtgtcactctgctgctgaagctcgcctgggagttctgctgggcttatgccgggtagcccattgagccgngggaagccctattcagngattccattag

SEQ ID NO: 42 - DNA, 596 bp, Homo sapiens
  Genbank Accession No. AA127718
  misc_feature (1)..(596): n = a or c or g or t
gatgacttcaacttttattgaatgaggtctttattttttaacattacaaactaacactccctttctgaaaaggcagatcttacactcaaagacaatcttcaagcatttttttgttgttgtttaagaaattgagaggggaaatccacagtttattaacaagaagattcaaaacttcattttacagtaataatgggacaacacctaatacatttcacaatcaaaagtggttcaagctaagaatatctagaacagattttaaaatctgggaaagatgacataaactggacaattatcagtattgctcatcacaattttggctctaacagtacaggacaaatgcttgttttgcactgtgcctaagacggccccttcattaaggttcaccaggacacaggcagcatccccgcctcccagtcatttgtacaaatcattaaggcaaatctacaaaggaccagtaaggcactggggcacagcagctgactgcaggaagtctatgtaacttccggtagtaaacagcctttaatgcagcataggtgtgaaaattcagtgttgttttttttcagtgtnacctgcacctaagcccaaaggnacttcag

SEQ ID NO: 43 - DNA, 611 bp, Homo sapiens
  Genbank Accession No. AA127727
  misc_feature (1)..(611): n = a or c or g or t
aaagttcagttcagtttattacagtgtcaagtagatttacaactattgcacttatcattctggtgacagaaggccaaaactgaagattgagattttcctctaataaagataggttttcagaatcttcaatataagatgttaaaattataaaggcaaagatatatacctcatgttccattccatatccttcctgctgttgtacagtttgctgcaaatgataatttaatttggataatgctttaaatcattgatttctcatgaaattacttttgagtgaaatttgacaagaattttctttatactctcttctttaccaaaacgtattagaagtccccatagtccaaaataaaatgtaaccatagaatggggagataactttagtcaaagaccaagtaaatattaccttctttgcagaactccaggttgtagtcacgtaaaagtgtggccnttgttgcttaactttttggacnatgggaaaaaaaaaccataaaagctaaaatgtggtccagcattgaaactcttctcaaaaccagaagaaagcatgaccatggttgggaaagtgtttacattccatggaatctatccatggacngttggtgttgctcacctat

SEQ ID NO: 44 - DNA, 616 bp, Homo sapiens
  Genbank Accession No. AA127736
  misc_feature (1)..(616): n = a or c or g or t
ttctcattcaaatttaaagatatctttctcctcttgatcaatctatcaatattgatagaagtcacactagtatataccatttaatacatttacactttcttatttaagaagatattgaatgcaaaataattgacatatagaactttacaaacatatgtccaaggactctaaattgagactcttccacatgtacaatctcatcatcctgaagcctataatgaagaaaaagatctagaaactgagttgtggagctgactctaatcaaatgtgatgattggaattagaccatttggcctttgaactttcataggaaaaatgacccaacatttcttagcatgagctacctcatctctagaagctgggatggacttactattcttgtttatattttagatactgaaaggtgctatgcttctgttattattccaagactggagataggcagggctaaaaaggtattattatttttccttaatgatggtgctaaattcttcctataaaattccttaaaaataaagatggtttaatcactaccattgtgaaaacataactgttagacttnccgttctgaagaaagagcatcgttccatgctgttcangttcctcgtcaactgta

SEQ ID NO: 45 - DNA, 648 bp, Homo sapiens
  Genbank Accession No. AA128249
  misc_feature (1)..(648): n = a or c or g or t
tgaaaactgcagcttccttctcaccttgaagaataatcctagaaaactcacaaaatgtgtgatgcttttgtaggtacctggaaacttgtctccagtgaaaactttgatgattatatgaaagaagtaggagtgggctttgcaccaggaaagtggctggcatggccaaacctaacatgatcatcagtgtgaatggggatgtgatcaccattaaatctgaaagtacctttaaaaatactgagatttccttcatactgggccaggaatttgacgaagnactgcagatgacaggaaagtcaagagcaccataaccttagatgggggtgtcctggtacatgtgcagaaatgggatggaaaatcaaccaccataaagagaaaacgagaggatgataaactggtggtggaatgcgtcatgaaaggcgtcacttccacgagagtttatgagagagcataagccaagggacgttgacctgactgaagttcgcatgaactctacnacattctgtnggatatattgttccaaagatattgttgtttccatgattagcaagccantaattttctncccagctgatttantccatatggtacgttggttaataactttttagatttgaaaaaaaaaaangggcccagctnttccctttnggg

SEQ ID NO: 46 - DNA, 464 bp, Homo sapiens
  Genbank Accession No. AA131149
  misc_feature (1)..(464): n = a or c or g or t
cctgccagcccccaggaggaaggtgggtctgaatctagcaccatgacggaactagagacagccatggnatgatcatagacgtcttttcccgatattcggcaagcgagggcagcacgcagaccctgaccaagggggagctcaaggtgctgatggagaaggagctaccaggcttcctgcagagtggaaaagacaaggatgccgtggataaattgctcaaggacctggacgccaatggagatgcccaggtggacttcagtgaagttcatcgtgttcgtggctgcaatcacgtctgcctgtcacaagtactttgagaaggcaggactcaaattgatgcccttggagatgtcacagattcctggcagaacattgggtcccaggcttcccaaaagtgtttgttggcaattattcccctaaggctgagcctgctcatgtacctctgattaataaatgcttatgaaatgata

SEQ ID NO: 47 - DNA, 612 bp, Homo sapiens
  Genbank Accession No. AA131456
  misc_feature (1)..(612): n = a or c or g or t
cggccactccagagccggtccctgtccttggaaagctgtgaagccttgcgttgagttccttctcgatactgacggctccgtgctgacattctgagctctggagtcacaccagcgcaggggcgtggaggaactgaggtttggaaggaatgccaggtctcgcacagcttggcctcgagaaggtgagaggaaggcaaaggccagggaggggacccagagaggcctggcacacaaggccnaagcaccaccgtcaacacagcccagtccatacagaaatgggtttcatgcctgaaaagctttttacagaaagatgccgcctgtagccagtgacagccgcaaccctacaggcctcagttccttgcagaggtgaggggtagagagtcagcctctctcccttccagcagcgacccagcttccctccacttccaggtggtgctgggctcaccaagggagcactggtgggtgctctgaaaacccacaggatcccacctccaggcccacctgggtcccatctcactctcttcttctttcaccaattgctaacatagaccttgttgggatcacgatggcttcacaagccagctgttgggtttgctatgttactgtggctcagtc

SEQ ID NO: 48 - DNA, 587 bp, Homo sapiens
  Genbank Accession No. AA131632
  misc_feature (1)..(587): n = a or c or g or t
ctgagtcaatctgaggctaaggacatgtcctttcccatgaggccttggttcagagccccaggaatggaccccccaatcactccccactctgctgggataatggggtcctgtcccaaggagctgggaacttggtgttgccccctcaatttccagcaccagaaagagagattgtgtgggggtagaagctgtctggaggcccggcagagaatttgtggggttgtggaggttgtgggggcngtggggaggtcccagaggtggganggctggcatccaggtcttggctctgccgtgagacctttggacaaacccttccccctctctgggcacccttctgcccacaccagtttccagtgcggagtctgagaccctttccacctcccctacaagtgccctcgggtctgtcctccccgtctggaccctcccagccactaatcccttgctggaaggctcagctctttggggggtctggggtgacctccccacctnctggaaaactttagggtaattttgcgcaaactccttcagggttgggggactctgaaggaaacgngacaaaaccttaagctgtttcttaagccctcaagcca

SEQ ID NO: 49 - DNA, 594 bp, Homo sapiens
  Genbank Accession No. AA131648
actgattgaacattagccagaaacaaaatatgatttacattttttttttttggttgctgggactgaataccctaaaaactaagagatgtgagtggggaaaatgtctaattgataagaaagttgatttatattatatttacatgcatcttctaagattgcctttacagtagccaatcagaactttaaaaaaaaaaaagctaacaacatagatcctatgtgttgcccttaagactaaaatactttgcacacgtgattgaatggctcacttaagttgttgaatttccttatacatttaaaggtgtacttccgttaagaattattccattttaaatgggtaactttcagcttccgaactattttcctaaacattccagttgtgtattataaaagatcaaaatatctctaggtggtagtacaattttcatttataacgtggaaaagttaactgttaggtttaacattagtattagtgtttttgcaattgctcatagaaaagaacactgaataatggttttcataccatttttggtaaaacattcttctcccagtttgattcccaaatgccttttccccaattgtcctaatatatccata

SEQ ID NO: 50 - DNA, 470 bp, Homo sapiens
  Genbank Accession No. AA131894
  misc_feature (1)..(470): n = a or c or g or t
taatttctatgcaatcagggtcctttctggttggtgctaagtactggaggagcagctgagcgngcaggggtgcccccgggnccggctgctggaagtgaatggggtcagtgtggagaagttcactcacaaccaactcaccaggaaggtgtgactgcctgtctcccactctcctcccccaatccgggcctgggcncacctcgggaaacgcctccttccccatgcgcctaacctccttatctggtctcctacctttatcaccatcctccccctctacagtttgtgccaggctccacttagtgcctgggaggaggggctgtggggggagcatacctcttctctccctgcccaggtgttatactgatgccctgctgggtcnccacagctttgggcagagtggacagcaggtgaccttggctggtggnagggcagaaggtggaagaacagtgtcgccagctgggattgcccctggn

SEQ ID NO: 51 - DNA, 722 bp, Homo sapiens
  Genbank Accession No. AA133248
  misc_feature (1)..(722): n = a or c or g or t
ggcacgaggcggcacgagggtttttctatagaaaaagtaaaagatcaggttatactttaggttaggggttctatttattcctgttagtaaataaaattaacaaatttctttgtttaacaaaagattaatctttaaaccactaaaatacatagactgattgattattcaacacattggaattatgtcggtcatagtttcctgaagcatttagttacaacctgaaggaataaaatgatttgtggaaatgcttaaaatagacctaactgaatacagtctcatcttgccgcgcctggcttacctatctgtggaaagctaggcttcccaggctgggctctgctgtctggtgcctggaggtgtgggagggaagatgagttatttaactggtaagcgatttgaaacactatttttatattaaagtaaatggcatggagtatagtgcaaattcatttttaagatagaacacaaaacttgaaagaagttttatgcgtgtgacagtgtatggggctgcagttggtctccctggaggggacttccacacctcctgcctttagncatgggtggaaagtgctcagtgaagtacacctgtgtggcccagttctgaaagctttatacagttgaattttaagtggggttgataacaccttggactgttagtgttaaaaatccagtgggttgacctttaaatgccacagtttttaaatatattgctgcattttatagat

SEQ ID NO: 52 - DNA, 593 bp, Homo sapiens
  Genbank Accession No. AA133979
ctgtctctaattagttacctcagtttgattgaagccagtggagttgtgcttttcctctacttctacttcctctcccccacctttttctgcccagtgtaggtgtattcttaaattcagacgggaagattctttcacatatcactcagttacctcccaatctgggggagtttttcttacaacttgataccagataccattaattttacattcctgaataaaggcctagtacccacgcatatttcaaccatgcatatatcaagttcaaccgagttttaataggggattaaaaaaacaagctgttaggtttccatgggcactggttctcataggttctattggtgataactgctttaacatggagcaagagtttgtgaatcaggaaatagaataaattaaatttaaaatatatagaggaatcctcttgattgctcagcatgatgttagataaatgagtttgtcagaaaatatcagtatacgctgtttaccaatgttatttatttacattcttctaaagccattatggatattgtattatgagagctaaacctaaataagttatctgttccctaggaccttctctgtaaatagtgaat

SEQ ID NO: 53 - DNA, 608 bp, Homo sapiens
  Genbank Accession No. AA134589
  misc_feature (1)..(608): n = a or c or g or t
cagtagggaacatgtccgtctaccctctcgcactcatgacacctccccctaccagccctcctcttcctcctcctcctcctcctgtgggaggtggtcagtgggacttagggatctttcacctgctgtgcccagtagttctgaagtctgcttgtggagcagtgttttatgtttatccctgtttactgaagaccaaatactggtttggagacaacttccatgtcttgctcttctacctccctagttagtggaaatttggataagggaactgtagggcccagattctggaggttttatgtcattggccacagaataactgtctctaagctatccatggtccagtggtccctgccaagtctgtagacttcagagagcacttctctcttatggggttcatgggaacaggggcgggtgtgacttgcttggtggcctcattccatgtgtgcctgtgcctggggatggactttgttaagcagagtcagcagtgaggtcctcattctccagccagcctctctgccctggagaatcatgtgctatgttctaagaatttgagaactagagtcctcatccccaggcttgaangcacatggcttctcatgtagggctcctgt

SEQ ID NO: 54 - DNA, 609 bp, Homo sapiens
  Genbank Accession No. AA135525
  misc_feature (1)..(609): n = a or c or g or t
gtatgatgccatttatatgaaatgttggcaatagatgaaatacacagcagattggtggtttctagggattagggagataatgggttggaggaatggggaatgactgctaatgggtttcagggtttccttttagggtgatgaaaatgtctggaattattatcgatcgaatgcatctgtgatatggctctagttatgaatatgctggatataagtcttatgaatagacaccaagtataaatcttatgaatatactcacaccactgaattgtacactttagaagggtgagagctttatggtattgacttgtatctcaataaaaactttttaaaaattaaacacacacacacacacacacacacacacacacacacacacaccaatttctttgcagtcctgcatttcttaggattcagttctggacttggtcttcactttctctgccttctggctggcaagaaatgcaaccctcttttaccaccaaggaggccctctgggctctctcacttagcctttcanttgcnggattgattgcatttagccttttacnacctttttcccngagtcttgggaaagagcccctnactgcatgggccatttaccgtacngcc

SEQ ID NO: 55 - DNA, 498 bp, Homo sapiens
  Genbank Accession No. AA137038
  misc_feature (1)..(498): n = a or c or g or t
tttgcttaaatcagccagtttctgttgcttgcaactaagaactcacgatgttagcagagatcatgtttgtctcattcgacgctgtcaaaaaggttttgaacataatctattgcacctctgtcctacagactgagagttcctcgaaacagccactttactcaatcatgtttatacccttagtgttaagtgccggaagaatatgtactaaatgaatgaatggactgggctgaagagcaatgatttaccaacactggttatagttcatgcagccccttgacctaactgaacacagcattattacaaataagacatgatcccagctttcaggacctcttagatgaggcgcgaaaggcaggtaaacggattttcacaatgccaggtgagaagtgctgtaacaaaggttatgtacagaacagaaggcaaccaattcccagacacgggtcagagaagactctcccagaagtacnactgtatgcaatctggttaagttagtgggac

SEQ ID NO: 56 - DNA, 450 bp, Homo sapiens
  Genbank Accession No. AA142875
  misc_feature (1)..(450): n = a or c or g or t
tttgattgaaaaaagtttaataaaattaaaaggtacaggtgatactgcattttttggctctgttttactaggcaatgtgtaagttgagggttacatgtagaaaagttgtatatgaagtagaaaagatgcagctatcctcactttttaaaaataggccaaagactttaaaactggtcaatatcacaagtgatgaaggaaaattacattggctggacatccttttacatttctgaagtgcaacatttaaaattaaagttttagtgaacactgaatatgcagcatgaagatgcaatcacatatttgggctcaacatttcaaaatcagaagtatatttcagtaatacggttgaacttaattgaatagtaattggtaactgtaggttttatggtacagattatgttttaagggcatctgtaaatattttgttactattttaacttttcnattttt

SEQ ID NO: 57 - DNA, 572 bp, Homo sapiens
  Genbank Accession No. AA142913
ttttttgacattgttctactgttttattgactcgttgcatttacaagttttgctaatgatacacagtctacacttactaataaattatactcacagtgtttttagtgatgtgactttgtttcaatattttataataaaagattataggagtaattacagacaatgatagaaaagtttgaggcatcgtgacaaaatagtgcaaaagcctaagttatccaaaagatgtagtgatcataattataaagactgtgtagtgtccctgggaaatgcttacaatgagataccaagcagtcaaaacggaatctaaccacgcacctgtacagtagttacaaaggtattacaaagcttgtctctgcatgaacacagtaaagaagtcacacatacacaaacgactacaatggtgttctggtattgcgactgtttgttttttcttctttaaatattattttgctttattgttgtaatgttatttttgtaataaataaattcagagagaacatcctactattagacaaggaaaatgccagaaatctgagatattttccctcttatggccgtattatattggttac

SEQ ID NO: 58 - DNA, 640 bp, Homo sapiens
  Genbank Accession No. AA142956
  misc_feature (1)..(640): n = a or c or g or t
aaatgaaatgatgttctttatttcacgaaatcatcaatcttaagcacgagcaggaataaacaactcccagaagaagcttaattcattcttcctggattttcactgtgtgttattaaatcacaaaaatgacagtccccacactgccctttcccactgacaccaagtccaaccgtgagcacagtgcctctgcgaanatcctggcacccatggtgagcgctggcgaccaggcagtctctggccagcaacagggactgctcaagttaccgacgttggtaggagctgggctcgcatggccagaatggaaccccctagactttccacacgtcacctgcctgaacgctaactacaaagaggaaaggcaacttaaaggtgttttctagatgcagcatcagttagtccctctctttgtgctttaaggaagatgctttgtgcttaacacattcatctgctgatgggacaagccattctaaagggcagaaatgatcatcttagaattaacactgactttgtaacacctggatgttaactgtccaaatggcaaattattcatcattctanggatacagttagctagctgtagcatctaattttancctcgtgccgaattctggctcganggcaaattccnatgtgagtcgat

SEQ ID NO: 59 - DNA, 552 bp, Homo sapiens
  Genbank Accession No. AA143491
  misc_feature (1)..(552): n = a or c or g or t
aatcccttaagcaggattgaagaccagtgaacgcccccgccttttggattttttgctcaattgaccgtcttttccagacctctttaagtcacactcttaacttagctttctctgatgtctgttgccgccattagtttttttctagagcccacactggcccacatagctccatcccatacgggtagctggctccanctgcgccaaggtgcagacccgccctgggaatgctggcctgtgacggagcctgaggtcacagccccctgactaagcctgagaccttcctaggggctgtggctgtttccggggaggccgggaagggcaagctgtgagccctgtggaggacgttgggagtaacgctgctttgcttttggcaggttgaaggggcccggcaggactcggggaagggtggcctgagagcagcgatgacctctggggtcactgtccaggaaggacttcacctggaacaagagctggaagcagccgcttgccaagaagcttgtcccctgaagcgcttccagttaaggtncggctcaggcctcgaanttctcttgg

SEQ ID NO: 60 - DNA, 649 bp, Homo sapiens
  Genbank Accession No. AA143745
  misc_feature (1)..(649): n = a or c or g or t
ttttttgacaatgagaaaaaattttatttatgacgatcttgagcagtataaaactcagaagctccactgaggtgaaggaaacatggacatgatactaagcaaagcctagtcttttccataaaatgaataagaagtacatttggtggagtttgagaccagcctgggcaacacagtgagaccctgtctctaaaagcattaaagcattaatcctcgcatttcgatagggctatgtagcttttaagtaagcaatgttagaatgagttgtagagttttatttttgtgaatatagtgagtgacagatggcaattacatgaggatatttgaacgaaggtacataagcctaaacaatttcacctaggtaaaatattgatgtcataaccaaactatatggccccgtttcataaaggttactatattcnatagagagtgaagaggtggcctttctatcccagcttacccnattcctgttattggtccaattcncctgaagcctgcataactagctgccatcaggtaaatgcnattggctagcagaagactgcagttcnggtaatattagaaccngcagggggaacttggggacctgacnttaaaatcnaggaccggantttaggatgggcncgtagaacngaatgttatggcctagtaa

SEQ ID NO: 61 - DNA, 688 bp, Homo sapiens
  Genbank Accession No. AA147088
  misc_feature (1)..(688): n = a or c or g or t
ttttttgctttttatacaaatattcaatcatcccacccccaccccaaatcctccttcctcactaacccccgtcttgcatggtctcgtaaagcccaggacgcagtggtgaatggcacttgcagtggcatgagattcaacatcgatgggactcagctgggactgtcctcactcaccgggtgcagagtctggtccatgaagagggtttctctctctgctcccaggggagggctggggtaagcggtgggtgagactccctcactctcagttggccctgatgatggaatctttggtgcagcctgagaaaggctagagtggtgggaggggccgggaccctgcgaaggtcacaggccagtgctgtgggcattgagagaactgcagtggtcacagtgggtgctctggggtgcccatggcaagngttggcagtgacccacacctgggaaggtgtcagggaagtgtacagaggtggtgcccgggggagggcagggcaccatgccatgcccgttggactgctccttggcaaaagtcagctagtcctctggttccagagagcagaagcacctaangcagcnagtggtcacgggaggccaggtcagctgaccaatggcagcgtcaatcccagcagcggaaaagttcangatgaactgganctggggtacctgggctgcaagtggaagaagcnccactggct

SEQ ID NO: 62 - DNA, 538 bp, Homo sapiens
  Genbank Accession No. AA147751
  misc_feature (1)..(538): n = a or c or g or t
acataaatcgaggcttttatttacatcataggacaagaaaaggatacaaaagaagtctcttggtcaagcacatcaagcgaaantctaaaactcaatactcagtaaggtgtgggcactgatattgaaaaaaagaaaaaaaaagaaagaaaaggtaaaaaggtaatctgtgacacaatccaaatgcttacactccagggattgagtaagagaaacccagggcagccctgccacagagaatgacggctcaggttgagtgacatctgagattcatcttctgtacccgtgaacctgactcccaggacaacccctaggaggttttgacttttgacattagtgagttaattcttaaccagattcttaagaatttcagggccaaacaggcttgaatgtacggtttttccatttgggggatgggagtgggaagctcttcngggacagatttccaggcaaggaaggncccagcagctctgtnccccancctgggctctgctccatctcccacgagaacttgtgggctgcctgggctcgtnagcagctg

SEQ ID NO: 63 - DNA, 652 bp, Homo sapiens
  Genbank Accession No. AA147884
  misc_feature (1)..(652): n = a or c or g or t
tgactttgctgatggtttattaccttaaggaaaagacttacacagagaaattgagcaatgaaaacccttcacattgagcaaacacattccacgctacacaaatcatgagaaaaatgagaactgttgtgaaacatgacagattgcccaagtgttatttttcctctattggaaaattctaagacgtttcctcatgtgtagtttttcagtcacaaaaatggcagtaggaatatttaaatattaaatcacagtttgaaaatagatacatacatacatatatatacacacacagagatacatagttgacttatgattcccagatatgcagggttatcattgtgactgcttggatcaagacaagtttgtaaaaagcagcgacatagttcaacataatagtcaggagctagattacttccctgtaattgctatgcacacacagtacaaggctagcgagattatagacaatctgtcttcgaatctactatcttgataattctgaatcttttcaagttaaaattgcagctattgtcagtaagcgcccctataaaggtcaggcctttgantgggggacgataactngcgtcaccaggagagaggcncggttcaacttccnggttccgtctggcngcggtcacagccggnaacctgggtcccg

SEQ ID NO: 64 - DNA, 608 bp, Homo sapiens
  Genbank Accession No. AA149312
  misc_feature (1)..(608): n = a or c or g or t
nggctcttcagcgtcacaagccagcaactctctttgcattaaaatttcaaagtttaattaatataattaaaagcaacagcaagcagcagcctgtgaagattttgctcatcttttttatgccttttgacattgaatgacctattactgtatgcncattacttggattttgaggggcacnctaccttggttatgatncagtanaggaaaangacnacctttcttcaatttacaaattaaatcttctggagggtcgctatcacaaaacattgacgatgtatgtattataattttttaggaaaaaccaccatcgtgtcacgtcgacgatgccaaattatgttagcgtgcnngaaacaccgtgggggaggaaggcagcagctgaagaaaaaagctcaaatgatctagtcactttcgatactgtacttcagatgcgaaatggatattcgagtggaaacctgacaaagtgcgcctgctttgatgtgaactggtatagacaatgaccagtggctgggtcagtgggatgtctctctgtgagcacaaaggcttatcaaatgacactaaagataagttcacaaccatcacattggaagggagaaggcgacatttcatnt

SEQ ID NO: 65 - DNA, 645 bp, Homo sapiens
  Genbank Accession No. AA150501
  misc_feature (1)..(645): n = a or c or g or t
tcattgaaaataagtttaatgattattaagtttccaagctagattacagaagtctttttagcccatatcataaataaaatagttctgaatttttcgtatggaaaaatatactctgagttccaagcaaacaacttaagaaaatttttagaactaacacattcctatattgggaagagctcaaaagtctgttcttcctccccatccactgttgtttaattaatctcttaatatcataaagtccctcatgtgccaagtgtagacagtcatttttgaatcagggctcactttgttagcttttttgtcaattaaacctcttttctatntaaattaccgagtctcaagtatgtcttcatagcagtgtgaaaacagactaatacaggaatttgggtaccaggagtggggcattgctataaagatacttgaaagtgtggaagcaccttnggaactgggtaacgggtnagaggttggaagagtttggagggctcagaagaagacaggaagatgaaggaaagtttggngcttcctgggagacttgttgaatggttttaaccaaatgcngacagtgatgtggacgnttaagtcccactgggggggtcncagaaggagttgggggaccttnttgggacnggagttgccatagatcnt

SEQ ID NO: 66 - DNA, 605 bp, Homo sapiens
  Genbank Accession No. AA151346
  misc_feature (1)..(605): n = a or c or g or t
ctcacaggcttcttctgccagggacatccgttaaatattgttcccccaccactgagtcctggagctatagatggtcatgacagtgtggttgacaatgtctccagccctgaaacctttgttatttttagtggcatgcaggctatacctcagtatttgtggacatgcacccaggaatatgtacagtcacaagattactcatcaggaccaatgagaccctttgcacagcatccttggaggggattcgcaagtggcagccctgttgattaatctctacatcattttaacagctggtatggccttaccttgggtgaactaaccaaataatgaccatccgatggctcaaagagtggcttgaatatatcccatgggttatctgtatggactgactgggttattgaaaggactagccacatactagcatcttagtgcctttatctgtctttatgtcttggggttggggtaggtagataccaaatgaaacactttcaggaccttccttcctcntgcagttgttctttaatctccctttactagaggagatanatatttgcatataatgaggaaatttttctagtatntacgcaggccttttaatttctaanatg

SEQ ID NO: 67 - DNA, 618 bp, Homo sapiens
  Genbank Accession No. AA152276
  misc_feature (1)..(618): n = a or c or g or t
catcataaatctcctaaatattttacagttgactctcatgagctgattggagtcagctggaacataccactgcctctagactaaggccagcagatttagcaaatacagactgccccagttcattgaattttagataaatgaaataaatctataaggttaagtatgtccccagaactgcatggaacatnnttaatctaaacaatgatttgttgttcacctgaaattcaaatttagctgggtgtcctgtatttcatctggcaaccctacttcagacccaggtgtaaggtacatggatgtgctttggtcaaggaataggccaaggcagagatccatgcctgcatgactcagtgggtttggtgcacaggcacaccacctccacttgttatataacctgtttgtgtaagttcatacttgggtctgagccactgttggtctgtaaaaggtaattggtcccgctaatgctggtacaaggggctcctgggggttccggctcagctccaacatggcttgacatgggtgggcacacctgggcgccccggtaagagagagagagagcccaagctgtccggtttgcagatggacangaaggagccngacacagctcagcttgttcacgcc

SEQ ID NO: 68 - DNA, 518 bp, Homo sapiens
  Genbank Accession No. AA155914
  misc_feature (1)..(518): n = a or c or g or t
cccaggctggagtgcagtggcaggttctcggctcactgcaagctccacctcctggattcataccattctcctgcttcagccttccgagtagctgggactataggtgccaaccactacgcctagctaatttttttttgtatttttagtagagacagggtttcaccgtgttagccaggatggtctcgtcctgactttgtgatccgcccgcctcggcctcccaaagtgctgggattacaggcgtgacaacccacacctggccccggcacgtatcttttaaggaatgacaccagttcctggcttctgaccaaagaaaaaatgtcacaggagactttgaagaggcagacaggagggtggtggcagtaacactgcagctgcttctggatgctgctggggtgctctccggaacgggtgtgaacagcgcattcaacatgagcaagcgcctgcttcggtgtgtctcattcaattgtgcacctgatgttgaancagccttgggaaggaaaccactcagagagctancc

SEQ ID NO: 69 - DNA, 639 bp, Homo sapiens
  Genbank Accession No. AA155952
  misc_feature (1)..(639): n = a or c or g or t
ttctccacaggacaccgaatcaaaaggagagaccagactctggcctcatacccagcctatttgaaacaagctatctagtttctcctgcagacaccttgtcaacaacatgcaacagtgtcaggtgccttgcaggaaaataatctgagtcccaagctagcctgtgctcatccacaatcacaatgaacatgtcaaggaagaatttgcagagactcaagggaagcacaatgggataaggtaatcactttcagtgaaaaactgttttcttgaaaacaggcttggacacaattgaaagctggcttcctgcaaacacaccaagagtctgtaatctagcctatccattatatgtcctttattattcatgatatcctattcttctaccttgttgcctggtaactttttctgaggactgagtttctgcagcgatgtggtgcactcttcctgtgatgaggaaacatctgggccccttctgcaggctttggaagatgatgtgcttgtcaangggtaaagggaaatggatttaattctgcttaaactatcatagacgttccaaatagatatgtaaattcnctgtattagaaaagaacgtgatncaattganattccttcttaataancctgnagctgcagaganaattgaaa

SEQ ID NO: 70 - DNA, 562 bp, Homo sapiens
  Genbank Accession No. AA156998
  misc_feature (1)..(562): n = a or c or g or t
gttacagaaccattaaatacaacttatacacaagcaagctgggcggcgtccggggggcagggagagtgcaagagggtcaggggtgagcagtccgggcccggtcctggagggggctgaggctgccgtcgtgggaggggcttggctggcggaggcgggctgcctgtggaggccttgaagctttgccagcagctcctggatgaagtcctcgacaggtttcccacatgacttcaggagtccctggattttccggcttctctcctcttcactctctaactccaacaattcatcaatgttgatctcatcgggcatgtctgcctccatgccgcggtacagctcctccaggcgcccgtcgatccacttctccacgtccagccgccgctgcagctcccgccggtcatacttgacggtgacgcgcgntgccgctttctgcagccccccgggaactgccccctggcccgcggcccgcgaatggagactgcagcttgctcagcacgcgcttgcccagccgctgagctgccatcgcgctgctggaaccagctggccccgctcgtgcgaattntgg

SEQ ID NO: 71 - DNA, 417 bp, Homo sapiens
  Genbank Accession No. AA158731
  misc_feature (1)..(417): n = a or c or g or t
ttttttgcaaagacaaacattttatttttcatgataggagctgtagcagagtatatgggggcctctgcagcccccaggctgggacntggggcctgtgaccttgagaacctcatctcacattctgcagactttggcggcggggcagtgctcgaccactggctgggtgggctggtctcagcntcntcctgcaggcccagggctgaaatcataaccgtcagcccagccttggcaaagataatgcaactttggcagggctggntgctgggagggggcaggcacttgctcctcgtagagcaagagtgggtttcttccctgaccctcccttccaccccggtaggtggttttccttaggaactcaggcctgcgggagaaaatggttccagcttctggangctgggtgggggtggggtgggggtg

SEQ ID NO: 72 - DNA, 528 bp, Homo sapiens
  Genbank Accession No. AA160156
  misc_feature (1)..(528): n = a or c or g or t
gccttttaggtggaccgctctgtatgactctcatgcttcaaaactattttttattcaagtgacttacaatggccctaggaaacaagttctgttattatcccccattttaaaatgatgaaaatggacaaagcaaaagcaagcaacttaaccaataccccatggcctcacagcctttagaatagtcatattatataaatatggcaataacaatgcactgaaaatgtctccaaaacaaactctacattttaaaaaatgtataacaggaatctaaggaaggggtcttacttctctgattcagggagtgcgaaatcccttaaactcatatcagacctgtgatgaacaaactcacactaagttttaaaaactgcttaatttactttatcatgactagtaatatataagagttttgtatatactttattaaaaataactttggaaaactatttttgcctgatcagcaataaaactactgataaggataagctgggttatcaaatattccctagtggttaatcngggcnaataant

SEQ ID NO: 73 - DNA, 572 bp, Homo sapiens
  Genbank Accession No. AA165701
  misc_feature (1)..(572): n = a or c or g or t
tacaagtccacacttggccagtttattaaaggcagggagcttcggcagggtccaaaagggagaagttgggagatgccccctcctcagctccctccttccccaacaactcttctacagcccagcccccagggcccagaggcagggctggcgtcaggcagactgtactgcataaatacgtggaggccacagcccgaatcagcagcgtcagggggcagggaaactgggtttgggatgagaagtgggtggctctgggggcacgtcccccagtgcttgtccagagcccagggacccacagagccagagaggggaccagtgggccagcttggggtctggctacgggcagccctgcccagcgaggcttgcaggtggctctggttttgggggagaagtggggtggggtgtggccatgcagggcccacngggacagggtggggtcaggtgctgttgcctgctccgttcaagagtagcatggccagctgggttcggagccaggcctcaagcacgctctggaggcagccgtggtacaggtctcactgagcctcgcgctgcacgtctgggcccgtagcgctgca

SEQ ID NO: 74 - DNA, 597 bp, Homo sapiens
  Genbank Accession No. AA166620
  misc_feature (1)..(597): n = a or c or g or t
tccataatgagcaacttttattggcattagggtgtcagtcctgtaaggatcatcacttaagtgtgtctcagtggagaaaagatcaagaatcatgtcaagaagaccatggggttttattccacttgagcaagagcaaatcagagccccatcaagcaggaatggtggcctttcccaggttccatccttaactaaactgactgttcccccttctgatttctccacggtcttctgtctcttgctctgccaaacttgttttcttatctctgtagagatgagtggcttgtttgatgttctttccatggcaaaaatttattcaatgcaaagttcacttcagacacttggttgagacttgaagtttagaccaatcctgagatgcgtggtgatcctgagagagagcagactgcctgccaggtaaatggtccatattatttcctgggcagaggccctgacaggggctggggtcccgtgttacctcagcagtcttctgctggcctactctgctgctctgtangaaggcccatctggccatttctgtgaaactgccccttctcaagcactccgtaanggtggtgttggccngcgcagaccagattcgct

SEQ ID NO: 75 - DNA, 595 bp, Homo sapiens
  Genbank Accession No. AA173572
  misc_feature (1)..(595): n = a or c or g or t
ttttgactcaatgggagaaatactttatggaagataaattctaacgggcacagcaaagtaacaaaaatgtacatttacatacaactgatccaaacaggaagtaaaagcattatgaaaaaagaacatgatgcaaatcatttccccctgacaaaaggagggatctgcgtgaattacagcaaatcaaatgatttccacattataaaagcaagccatggcttctacagatattttaattccttgggaggaagtttcacctcatcttttttccccagtaaagtaacaatcactgtaggaatttttaagtgcacaaactgcaaaataagagtaactacctctgccatgttcaagcacttgggcaattcagtcacttttagggttgtatcatttaaaaaaggggcaacatttatgaattatctcatcagatgcatggtgtttttcaatccagattcnagagtaactattagagttactcnttgagcctaatgggaacatcaaccgacgagtcctttcntgggtggtaacntgactgggagaccatggctacttgcccnggtaaggtggccctccgtgggcagagctaggactngactagact

SEQ ID NO: 76 - DNA, 607 bp, Homo sapiens
  Genbank Accession No. AA181060
  misc_feature (1)..(607): n = a or c or g or t
ctcactgatagctgatcacattaaacaggtacaggtgctaagaaagtttaagactgatcttttggcaatgacagtttaggttaactctgtttggaattcctaaaaataaaaagaaatcccttaaaaaaggctgacaaactgaccacttggccttgaatcgactgttagggtcacacctgccaatgccaggggacatcacaaaaaaatagagaatgccaagataaaaagttcactgcattcaatttggcctaatttcttgataatagtttcctattagattttccgattaatactgatggctcttacctaggctgtgagagtttttttttttttttttttttgcaattttataactttatttgatctgacgatcagcgattagttctcatccacattgactgtctgtagatttttgaaagtgggtaacagggtacataggtaaccaaagtatatagcntatttgggtgaatcttcatccncattacgttttctggacagccgcacacgggattcgggatggcacattccctattcccttggnccagacagctttgttgagccnggggtcangcgccnacccggngtcccactcctcagggaaattccg

SEQ ID NO: 77 - DNA, 515 bp, Homo sapiens
  Genbank Accession No. AA188763
  misc_feature (1)..(515): n = a or c or g or t
ttttttttttttatcttttgggtgtggaaacatgtgagtgtattatttatttttgaataaataatacaataaaatataaaacatacacttattgtggccctctgcacaagcaatctggttgtgcagagtcttggtgtcccctgctagtcttagtacctgtatagagctcttcagactgggtgtcgtgttgcagaggctagcaccattcctgatgtcaccctgggtgagacgtggtcctcagaatccagacttccttttttgtctttttccttcttccacatgttctaagaaaacatagatttctggccaggcatggtggctcacgcctgtaatcccagtactttgggaggctgagacaggtggatcacgaggtcaggagttcgagaccagcctggccaacatggtgaaaccctgtctccagtaaaantacaaaanatagctgggtgtggtggtgcatgcctataatcccagctactcaggaggctgaggcaggagnattgcttnaactcgggaag

SEQ ID NO: 78 - DNA, 564 bp, Homo sapiens
  Genbank Accession No. AA193340
  misc_feature (1)..(564): n = a or c or g or t
cattatagtctactgcccatgtaaggatcagctccggctaagaggccaaagatgggtgacatcgttatgctctgccttttattttttctttcttacccacttagcttcctaattggaggaaggaggcgtggtaaaggtatatgaagactatggtttaattagaccagaaaacactgtcataatctctggggtcatcagaatgtccagttttgtctttgggccaagataagggcagtgggatttatgatgtgttgtttatagtctgaaactactctggtgatcaccagggtcagtttctttaatgatggtttccaactggcctaatacattaagtaagacctgggctgataacatgaccagaccagacataaagaccctgttgggaatgaccattgaactctccaaagtcaagattccttacacaaatctatcagctgggagaaaatgaangccagtgtggtatatgtgtgcaaataaggacntttatgaagcctaaatatggatgtccctggacccccgatgtcaccggaatcccctttcctcctggnacaaacccttgcccgg

SEQ ID NO: 79 - DNA, 637 bp, Homo sapiens
  Genbank Accession No. AA195220
  misc_feature (1)..(637): n = a or c or g or t
caaagctttcccacagacctccctggcccacctagaggctttcttggtcagtgcctgtcaagntccagtcctgctgagccaaaggtttgtcattcctttctcttcctgtacatctgagcagacccactccagctttctggtgtcacaggcgggaatgttagttagtaggtagacttagatcccatttctgtcctgctcccaggaagattcttaggtcctcttcaatccagcagcccctcccagaggtgtgatcagcaggatgctgaggaaccatgttgcctttcctgtcaatcacagccaccttcctgttatctcctaaatggatctggcttttcctggaggctgccatggttggaagatggtatcagagggcctgcctgggcagtctgtctccgggccagggtcagggacctctgcctctggagccttaacctgtcctctgctaggaccagggtgatttcaagccagggaagcaactgggaccctgaaaactgtccctccccagcccgctccccctctctgtgccctggtccccttgctgccatgtggatgctgttgtgaatgctgtttgtatatatcaaaatgtttatantaaaaatgtttggtctgaaaattaaaagcacttcatttgaaanaa

SEQ ID NO: 80 - DNA, 810 bp, Homo sapiens
  Genbank Accession No. AA195251
  misc_feature (1)..(810): n = a or c or g or t
cagcattaccaaacttatttattaagaggttctgaggaaattgttcagagtactgccacagaccccgttttcttctcttagctctttggcatacaggccaatgacttcataccagccagcctataccacggatggcacaatctccatgccggtatcttagcacaactggtcttcagcactggggcctatagttcagacagctgctcagcggaagagggtttacactgcaggcccctctcttgacagaagtggaggtgaggcttgtctctgcttcaaggactctttctgccaacttccaacagcaagctgtgctgttcggtcataagcccccagaaagatgaaacctcccagactgatggctgccattcgagggaagacacctgcaaataatctttgccagcataattcttgtcttcgccacgtctagaggggtggtgactgcagcggcaaatccacctgcaaaagctccacagactgctgactgccaagaatccaccacatgatcctgcctccaggaccagagggcttttaaggactcccataaggaaactggaccaaagaaaaaggaatctctcttaaaactgtgcttttatagcctcgatacaaccctggataccctcttcatataagatggttagagaaaatctgaaatgttcttgtagaagcagatacctgtggccctctgcttaaccacttccagatggaactcgaatccggcaggaaccanttctccagcagaggcngccancatatgnttcatagggtccaatatgaggttgattcggcngccaaaaccactttncctattcc

SEQ ID NO: 81 - DNA, 635 bp, Homo sapiens
  Genbank Accession No. AA195614
  misc_feature (1)..(635): n = a or c or g or t
ctttcaccactgtaggaaaatgattgactatgcccatccctgggggtaattttggcatgtatacctgtaactagtaattaacatcttttttgtttaggcatgttcaattaatgctgtagctatcatagctttgctcattacctgaagccttgtccccaccacacaggacagccttcctcctgaagagaatgtctttgtgtgtccgaagttgagatggcctgccctactgccaaagaggtgacaggaaggctgggagcagctttgttaaattgtgttcagttctgttacacagtgcattgccctttgttgggggtacgcatgtatgaacacacatgcttgtcggaacgctttctcggcgtttgtcccttggctctcatctcccccattcctgtgcctactttgcctggagttcttctacccccgcagttgccagccacattgggagtctgtttgttccagtgggttgagctgtctttgtcgtggagatctggaactttgcacatgtcactactgggggaggtgttcctgctctagcttccacgatgaggcgccctctttacctatcctctcaatcaatantcttcttgaagcactaataattaatcctccgctgtctgcctgnagaagtaataatg

SEQ ID NO: 82 - DNA, 879 bp, Homo sapiens
  Genbank Accession No. AA203213
  misc_feature (1)..(879): n = a or c or g or t
agtacaggagcttgtgccgtggcccacagcccacagcccacagccatgggtgggacctgacggtgaagatgctggcgggcaacgaattccaggtgtccctgagcagctccatgtcggtgtcagagctgaaggcgcagatcacccagaagatcggcgtgcacgcgttccagcagcgtctggctgtccacccgagcggtgtggcgctgcaggacagggtcccccttgccagccagggcctgggccgagcagcacggtcctgctggtggtggacaaatgcgacgaacctctgaacatcctggtgaggaataacaagggccgcagcagcacctacgaggtgcggctgacgcagaccgtggcccacctgaagcagcaagtgagcgggctggagggtgtgcaggacgacctgttctggctgaccttcgaggggaagcccctggaggaccagctcccgcttggggagtacggcgtcaagcgcctgagcaccgtgttcatgaatctgcgcctgcgggaagcggcacagagcctgcgggcggactaagggcctccacagcatccgacaggatcagggcggaaataaggctgttgtaagagagaaaagagaaaaaaaagttcttgataacggcgaggctaatccgttgntaggtaatttacttgcatgccgctgtttaaatgtactggaactggcgtacaactatcgctgagaaccgttccgatggtatagaagccgccgtgcgtctaaatccatgatgcatgcgcctttgcgcttacgtgggagttgttcgggattacgcggtttttctttgaggccgaaaagcgttggtttcccaaaagggtgcctgattttgatagtcacaacttgtgtaaaaaatttggtttacc

SEQ ID NO: 83 - DNA, 828 bp, Homo sapiens
  Genbank Accession No. AA203476
  misc_feature (1)..(828): n = a or c or g or t
atgaatgcggctgttaagacctgcaataatccagaatggctactctgatctatgttgataaggaaaatggagaaccaggcacccgtgtggttgctaaggatgggctgaagctggggtctggaccttcaatcaaagccttagatgggagatctcaagtttcaacaccacgttttggcaaaacgttcgatgccccaccagccttacctaaagctactagaaaggctttgggaactgtcaacagagctacagaaaagtctgtaaagaccaagggacccctcaaacaaaaacagccaagcttttctgccaaaaagatgactgagaagactgttaaagcaaaaagctctgttcctgcctcagatgatgcctatccagaaatagaaaaattctttcccttcaatcctctagactttgagagttttgacctgcctgaagagcaccagattgcgcacctccccttgagtggagtgcctctcatgatccttgacgaggagagagagcttgagaagctgtttcagctggccccccttcacctgtgaagatgccgtctccacgatgggaatcaatcatgtgcagtctcgttcaagcatctgtcgacttgggatgtgatttggcactgttgctgtgcatagatatttaatgcntagtgttcagagtttgtggtgattgtattgtagagcatcttaacagatcgtaaagaaccaattaagcaattaaacaagtcctaatagagccgagatagtcgttgtgaggtattacctgaatcggcgttaaaggtggagggaacatggtccatagtcttgtggactcgtgtgtgtggttgtagcggct

SEQ ID NO: 84 - DNA, 865 bp, Homo sapiens
  Genbank Accession No. AA203663
  misc_feature (1)..(865): n = a or c or g or t
caaagtctccatggcacatgactgaagactggtggtcgtgtgtgtgcggagtccacggaagcctcggggaggtggagctgctccttccattccgtcagacagtgatctgaaaacatgtagagaagatgagttgaggacagcttttctaaggcaatgtgatgtctttgctttcttatttctctttctctgcgttgttagttttgaagagtggaggagctaggggctccagaaagaatcttacacatgtgttgaagacattgatgtcatagggagcggggagctgcattcccttctgggctgttactgctaaattcagtatgaacagaccaggcggaaagcttggtggccaagcagtctgtgtgctttcccgctgatggagaacgttgcgttgttcacaataggggcctcatgggtgtagcccgcatgcagaccccattgctggcgcactgccttgtttgccgtctgtcttcaagaactgccgctctgttaaactgtccaatgtggtactaccctggttgtttttagaccagtaatgttttgttccaaattaggattcgtttccgagagttttgcaattgtaatgccacaaggcaattaagtctgtattaccaaaccggcgtggaccttgaccagttgatgtgatccttatcaggaggaaagtgctgctgtctttagagccgacagttgtaccctgcctaataagaagttccatctctgaaaaagagagattatgagcggcgtccccttggggatatccccggggaaagtgggaggagacttggccctcgggaaacggccccacgtggaaccccccaggcgcggagacggtttttcgcaagacggtccaagaggggngcgcttagcc

SEQ ID NO: 85 - DNA, 529 bp, Homo sapiens
  Genbank Accession No. AA211369
  misc_feature (1)..(529): n = a or c or g or t
aattaaggctttcagacctaatctagccatgaccaaaggccaaactccacagctttgtacaactgaagctcagcagacctttctggactttctcccactgctcctgttctatagccagttgctgtgttcaccaaacttgcctgacccttcctcctcctgtgctttcactcactctcctcctattttaatactcatctccagcctgcagcaccccaggcagtacaccttcacatgaggaaaatttacccatctttctacgctgagttnaaattcttccttttatgaaacttccctgaagtctaccagcatgacattccttctctttccntaagtccctattgctcttctgcncatcccanacaatttgggcaacctaagtcacaagttggctttgtggataatttcaaggtattactcctatttattantggtntaaggtccaaatttttcccattttgggnggataanttagncctttaatggttttcaaggaatggnttttgngcacaagcttanctttnaaaggtat

SEQ ID NO: 86 - DNA, 547 bp, Homo sapiens
  Genbank Accession No. AA224205
  misc_feature (1)..(547): n = a or c or g or t
tttttttttttttttttttttcaggtagtaaattttacacatttttatttttaataataggngtaaataccttcccacaacaatataatgaacattacaggaaaattaaggcaacttattatttacagaatgcctttctgngcaaaacaggacactatactcttcctacacattaaagcattaaagattaaaataacnctaaaaggtacttattatcagngtctttacngaggcaattaccagtgttcagataaataaatgtcagagctaatccaaatatgaaacttgaaattttcccaccattctatacaaattcccacagcaaacagaggaggttattattttngatangtcagggaaagactttgcagaggaagtaacatttctgagatggagaaaactaggagaggaacaggttggagaacaggaatccaaaagctgtttttgggtcaagagatgcctactagacattccaagtggaaatggtaaagccggtaaagggttagagcttacngaagnggtccagtcagtgagagcnggtttttga

SEQ ID NO: 87 - DNA, 420 bp, Homo sapiens
  Genbank Accession No. AA224344
  misc_feature (1)..(420): n = a or c or g or t
ttttttttttttttttttttttttttttttttaacgaaaagcaaacttctttattgtacacngtacagaatanaacgcagcttggcaggnngcatacggccctgcgcaggggaangtatttcaaatcngctggcaggttcaagcctttctgcnctgnagactttccacactctggaaaagaagcaaacaaacaaaccccaaagaacccccgnaaaaaacaaaaaccatccgggaggtgcatgagtccaatgggaatgcaaccgtgangccgctntcctatgcccagtgacagcacaggtccccgtaagttacagcnaggggaggggtagctcaagctacagaggnttattgtcatattgctaagacagcctaaatccnttaaaaaaaaaaaaaaaaaaaatcccaanccccggggtaagt

SEQ ID NO: 88 - DNA, 357 bp, Homo sapiens
  Genbank Accession No. AA227778
ccatttactttggattatatgtcattataaatattaacaaataagacttaaaaaggacaccttcgggtaggtcagaccaaaatacaaaacttgtctgtgggactgcagtttgaggacagtgtctgcagccgtcacatggcagcaaaacggggttaagcagtgcacgagagtctgcgtcgacgacagccagagtccatgcatcgggaggttcactcggtttgcgaaggaacaacgggctcggcatgcacggcccgggctcggcgggcggacgggccggggcgcagttccccgcgctcgccactagaggtcaggaggtgaccgcttcggggctggaagacgggcccgtcgggattggcg

SEQ ID NO: 89 - DNA, 481 bp, Homo sapiens
  Genbank Accession No. AA243659
catggaaaacactgtttatttgaaaacaatgagacctcaaatatgaaatatagttaacaatgacattgacactgttgctagcactttcccctaaaccacccataagtcttggacgcatgtgcatgcagcacacacacacacacacaaaaaccaaaaacaaagccaaaaaaaaaaaaaatcccaaacacaacaatccatgattgttcaatgactcctgatgccgggaggacaggctgttaaaagaatttgtctcccacaatatctctggagtgggcacaaagcccatcacctgttagtgatcacagacattcagttaacctgtccttccagtaatcagagacaacaattcagaccctggacttctcagaatccatgtactgctgagtcttggctttgagacaagacaagtcttggctaaattgaggcaggacagcagccccttccatatgtttggtcccatttgatagaaagtctaatttag

SEQ ID NO: 90 - DNA, 365 bp, Homo sapiens
  Genbank Accession No. AA251131
aaagcataatcccacaaggacaaaggaaacaagaagaggatgacagcaacaaggtttcagaagccagaaagctgatgaatgatcagtgcctaacagcatgagagaaaaacaaatgctaagacatcatggaaatactggaaggtgaccgagtgtacactgttacggaatcacccaaaggttcgggccttagtgaccttgcgcactacaggagtgggggcaggaaagcgggttatgaaaacaggagcgctggttgaagtctcttcaagaagcagttattgagaatccctctcccctcggccaagggagtgtcacagtttcccctccattccaaggtttcatgtcaagagaggacagagttacaggtg

SEQ ID NO: 91 - DNA, 348 bp, Homo sapiens
  Genbank Accession No. AA255502
atcatgtctggtcgcggcaaaggcggaaaaggcttggggaagggtggtgctaagcgccatcgtaaggtgctccgggataacatccagggcattacaaaaccggctattcgccgtttggctcggcgcggtggcgtcaagcgcatttccggtcttatctatgaggagactcgaggtgtgcttaaggttttcttagagaacgttattcgagacgccgtcacctatacggagcacgccaagcgcaaaactgtcacagccatggatgtagtatatgccctaaaacgtcaggggcgcactctgtatggcttcggcggctgaatctaagaatacgcggtctcctgagaacttcaa

SEQ ID NO: 92 - DNA, 569 bp, Homo sapiens
  Genbank Accession No. AA284268
  misc_feature (1)..(569): n = a or c or g or t
ggcagaggtattacctgaaaacttaaaagaaggcctgaaggaatcttcctggagttcattaccatgtactaaaaacagaccttttgattttcattcagtgatggaagagtctcagtctctcaatgaacctagcccaaagcagagtgaagaaataccagaggtcacttcagagcctgtcaaaggaagcttaaaccgtgctcagtcagcacagtctataaattcaacagaaatgcctgccagagaggactgtttaaaaagagtgtcctcagaacctgttctgtcagttcaagaaaaaggtgttctgctgaaaagaaagttgtctcttttagaacaggatgtgattgtaaatgaagatggaagaaataagctgaaaaaacaaggagaaactcccaatgaagtctgtatgttttccttagcttatggtgatattccagaagaattaatcgatgtctcagatttcgagtgttctctctgcatgaggttgttttttgagccagtaacaaccccttgcggancattcgttctgtaagaattgtcttgagcgttgtttagatcatgcaccatattgt

SEQ ID NO: 93 - DNA, 463 bp, Homo sapiens
  Genbank Accession No. AA292431
ctgggagtccacggtgtttattgggccaccccacgcatggccgtggccagggtggcagcgaccctcaccctggtctgtcatgcctgtttttcctacactcagcggcaaagctgcaggagcagggctgagcctggaatagcccttcctagtcccctcttctcagcccactacccatccatcagtcaccagccgtcacctcccctcccgtgctccaggctgggggagggagagcccagtggtggatccagcctgaagtcctgccctctctcatctgtctggaaaggaggtagcacctttttcgggaaacgggttagggagtaaagactgcaccctacatggtcctggtggtgggggggataacagtaaaggaatttgcaacgttttaatgccatgcctgatttttgggtcaggagtggtgacttgggtaaccacttggcgggggggcctgggattccctgctgtg

SEQ ID NO: 94 - DNA, 510 bp, Homo sapiens
  Genbank Accession No. AA292789
aaggatggagacggtttattgttataccaaaaatatatgtatatatctatatatatatgcagaaataaaggatcagaaggctataaacccaagtatcattagcatttatatctaggtgcagcattaagcctgaattcccctttacactttattttacactgaacgtgtatcctatgtacaatagagttaagcaataaagctgtcttcatttggaaatcaaggcaccattatcatccacatcttcaccaggactgtggttggggaccaaggggagtagggatgaagatgtccctctcagaaaccaggaagagccaagccgcgactccccgctccccaacccatcctcattcctcctctactgcctgtggcatcaccgtggggcctgtgttagagacaggtggggaaaagagcccaagagccgtctgcctgcacagagggcatcataaatgagaggggaggcgggcgcagtggctcaccctgtaatcccgcactttgggaggcgaggcgggt

SEQ ID NO: 95 - DNA, 378 bp, Homo sapiens
  Genbank Accession No. AA295451
  misc_feature (1)..(378): n = a or c or g or t
ttgcatttgttactttggggtgtgttatttgcatcagtattttatctctattaatgtttgtnctcatcactgcatattaaaaaaacttggatgtatcagtgtaacttaattttttattttcatactggcattgtagacacttgagaaagctgtatcttgcaggcttgacttaacttttttccttaaaaatctggnatataatcttacagcatttactggaataaacagtacaaagcattggngtgtaaaactctagatgttttggatttacagcgtttctttgataaatgattgtataccactagtacagctctagtacagcggtcacaattaaggctaataatgggtaagttttcttcactcctttaacacaagccg

SEQ ID NO: 96 - DNA, 463 bp, Homo sapiens
  Genbank Accession No. AA310786
  misc_feature (1)..(463): n = a or c or g or t
aaggtagcgtggccggcgcccgagctggggttgtntccctgctgggctgccgttccagctggactgccgccatggaactcagcgccgaatacctccgcgagaagctgcagcggngacctggaggcggacatgtngaggtggaggacacgaccctcaaccgttgctcctgtagcttccgagtcctggtggtgtcggccaagttcgaggggaaaccgctgcttcagagacacaggctggtgaacgcgtgcctagcagaagagctcccgcacatccatgcctttgaacagaaaaccctgaccccagaccagtgggcacgtgagcnacagaaatnagggactgggatctgcacagccattaaattataaatntggaccagcttctgtgtcgatgtgtgtntgggaggggtgctgaggccgagtctaggacctggcctctccctgccctgcctccgtccattgtttta

SEQ ID NO: 97 - DNA, 509 bp, Homo sapiens
  Genbank Accession No. AA312905
  misc_feature (1)..(500): n = a or c or g or t
gcgggcagagccggnctgagaggggcggccctggaggagacggaggccgngggtgggcccgaggcgcaagaggaagatgaggacgaagaagaggcgctgccgcactccgaggccatggacgtnttccaggagggtctggctatggtggtgcaggacccgctgctctgcgatctgccgatccaggttactctggaagaagtcaactcccaaatagccctagaatacggccaggcaatgacggtccgagtntgcaagatggatggagaagtaatgcccgtggttntagtgcagagtgccacagtcctggacctgaagaaggccatccagagatacgtgcagctcaagcaggagcgtgaagggggcattcagcacatcagctggtcctacgtgtggaggacgtaccatctgacctctgcaggagagaaactcacggaagacagaaagaagctccgngactacggcatccggaatcgagacgaggtttccttcatcaaaaagctgaggcaaaa

SEQ ID NO: 98 - DNA, 529 bp, Homo sapiens
  Genbank Accession No. AA351076
  misc_feature (1)..(529): n = a or c or g or t
caggtcgtaagccactttattccagtcccttgaacatcacaggctggttttatttgggacagaacaggttttatttccaaaggtccctgaacacagcaatgacaatgaacagcccagcagaggagtgacataaaccttgaggcatgcagtcttctgggtgctgtggagtcccttggccaaacttgagtgcactggattcgacatacaaagaccttcntgggaaggagaaggagaaaaacaacctccgagaaaatacagacagggtcagtggcaggccaggacagggactatttctatacattntggaagtntcggcattcatcagcctgcatgtggctcacttttctttctggaatagccggagacctctacttctcactccagctttaggttccaaggnacagagtgggtcttggctcagcgagatgtaatgnctaaggggcaagagcccagggaaggtttttcaaaacattacctgnttcnccttccaaagggggtcaaaggaaggacttggcttcggttcagagca

SEQ ID NO: 99 - DNA, 289 bp, Homo sapiens
  Genbank Accession No. AA369887
  misc_feature (1)..(289): n = a or c or g or t
ggtggaggggagccacaatttcagccatgacaagggttaatccctttnagagctgagggaggaggggagactggcacggagggactaaagtttccagtgtggaactttttccttcatctnatgcagcctcccccatacccagcccagggtagaaccacctgggggtnggaatagaaaactacagagagttttgggaacccaaagccacagggacttgggtcctccttcccaaatgggaaaatgggagctgggagatcaccttgcagagtgaccccaacaacacaggtca

SEQ ID NO: 100 - DNA, 311 bp, Homo sapiens
  Genbank Accession No. AA383718
  misc_feature (1)..(311): n = a or c or g or t
agtaacagaaaaaaatatatatatttcaaaggtaactagttttgttttactcaaactatttacaacaaggggcagagtagagacatgaatagctgcacaagttattttaattataaattaataaaagcctacattaaattcatcttattaactacttatgagagtgtataaaanctgatgaagccaacattatttggtacttctgatacttccattcgcttcaacttttctttctaaatagaaaattaaaagatggcaagccatttacaaaaagncatgtaatttntgttaatcaggttgacattttgaac

SEQ ID NO: 101 - DNA, 455 bp, Homo sapiens
  Genbank Accession No. AA393277
ctccacacctccctgcaagctaaggaagccggctccggcttggcagcccagaaaggggtcccacagtgcagcggcgggctgaagggctcctcaagcgcggccagagtgggcgcaaggcggaggaggcgctgacatcgagcgggggctgtgagggctgccagcatgctgtcacctctcagtcccactagatcccaagaggcagcagaggcagcttctgaaaaataaaataaattggagacccacagttggtgatctgtatggactgctcggcagacaccatgaccaaccgccttctccaaaggagccggagcagcctgcctgtggacgacaccaccaagaccatcgccaagcgcctagaagcctactaccgagcgtccatccccgtgatcgcctactacgagacaaaaacacagctacacgagataaatgcagagggaacaccagagacgtttttc

SEQ ID NO: 102 - DNA, 401 bp, Homo sapiens
  Genbank Accession No. AA400080
tttaagtctgaagacattttatttttcctatgtgggaagcaatgatgatcttacactttttgttttctgtttttaagaagggcagcacaaggatatgtgcagattttcttttaagtaccttgctaagcgacactagactaataaccattttctagaattaggtgacctacttctgaataaaattgaaactggattgcgtattcccttactaataataatactaaatatattcttaaatcagttttcaaaattcaagatgaaatctagaaatatggaacaactagcaggaataagcccgaagatgattctagctccgttactactaaaacctagtttctaaactttcgaggattttatatgaactcgcatgaaaaaatgagctcagaggctagaatatgact

SEQ ID NO: 103 - DNA, 428 bp, Homo sapiens
  Genbank Accession No. AA412205
aaaaaatatatgtatacatatcatatatatatataaaataaaacttataaatagtttttatggctgggtgaagtgactcatgtctgtaattctagccctttggcaggctgagcgaggaggatcacttgagcctaggcattcgagcccagcctgcgaacattgcaagactctgtctcatttttttatataaaatgtttttttaaaaaaccctatgtataattatttattttttttccccaaggattattcccaaactatgtacaattaatgggttgccttgcagagttggatcaataatacctgacacacttgtatagcaagcatacactttacatagttcctcgcatctattctttgaaacccagacacattctagtattgggcactagaaactggtgataaataataacaattacatatatttcctg

SEQ ID NO: 104 - DNA, 568 bp, Homo sapiens
  Genbank Accession No. AA417813
attcggcacaaaggggactacaggcatgtgcgactatgcccagctaatttttgtacttttagtagagacagggtttcaccacattggtcaggctggtcttaaaatgctggcgtcaagtgatctgcctgcctccgcctcacaaagcactgggattacaggcatgaatctggccttacgtaatatattttcttaatggctgcataatatcacatcaaataggcatttttcaaacctctttccttattaaacatgtagactatatccattttttactaaaataaataacatttcagataatatctttgcactgataatgttgccaagccatttctaaagtgaccttatcaatttaattaccattggatgagggtgttgctttcatcgcaccattgtagattgtcttttttatttcaatttgcgtttatttataactggttgcaaaggtacacagaacacacgctccttcaacttatctttgataaacccaagcaaggatacaaaaagttggacgacattgagtagagtcatggtatacggtgctgacctacagtatcagtggaaaagatag

SEQ ID NO: 105 - DNA, 543 bp, Homo sapiens
  Genbank Accession No. AA418080
tacatgtatattatttattgttgattctatacaccaaatggattacaagcagcatccagcagaagacagaccccccaaccctgcccaccaggcgtcacactctacaaaaccctgagggcctagaaatctgtaaatgcatcgccaagcactggggctgatttgcagtaattctctaagcaaggcaaacatgatctagctttgaaggcagcatgaaggcagcgggttggtgagaacaatctctccttaagagaagaagaaacctggggcggaaggagttttccccggaagtggcttgcagcccaccctctctgaaccacagccatggcttccttcccaaggccactgctggcttcccaacaacgcagattcagttctgactgtgggatctgggggctgaatctttgagtggtttatagctaaaagctaggatacatctaacatctgtcgaccaactctgggtcccgagttatctctagctgtctgctctctgcaaacttcctgagtttggaagttctttcccaatagctctacatcagcatctga

SEQ ID NO: 106 - DNA, 550 bp, Homo sapiens
  Genbank Accession No. AA418636
acaagtaagggaagacagctaagagaacatactatgacatatcatagaattgggatacatttttgttgcactggatttcaggctatactgctaaaataatttctacctgttaaattttgtgagagggtttttgacatcagaatttttgtatttctggtcaaattggtcttggaaatccctatggtctctaatttcagctcttgctgtaaactgcaagccaaatgctctttctcagaaagagctatatttttctcttcttacaggcaacccaatatttatttcataaagtgttataaatattgagaagatacactggggagatagcatataaaaatgatgctccaaaatgagaattctatatggggctttccctaagaagaatccatcccagcacatattttgaaaaggtgctgaattaaaaagtacaagagtttgctcatataaatcaagttgcccaggaaacctgaggtgatgctatcatttgtctcataatttagaaacgtgatctcttgagagagagactacgcattgcctgggcactttcagattc

SEQ ID NO: 107 - DNA, 484 bp, Homo sapiens
  Genbank Accession No. AA418995
gactagcatagacaagcttaacattgtagatgtttctcttcaaaaatcatcttaaacatttgcatttggaattgtgttaaatagaatgtgtgaacactgtattagtaaacttcatcacctttctacttccttatagtttgaacttttcagtttttgtagttcccaaacagttgctcaatttagagcaaattaatttaacacctgccaaaaaaaggctgctgttggcttatcagttgtctttaaattcaaatgctcatgtgacttttatcacatcaaaaaatatttcattaatgattcacctttagctctgaaaattaccgcgtttagtaattatagtgggcttataaaaacatgcaactctttttgatagttatttgagaattttggtgaaaaatatttagctgagggcagtatagaacttataaaccaatatattgatatttttaaaacatttttacatataagtaaactgccatctttgagc

SEQ ID NO: 108 - DNA, 456 bp, Homo sapiens
  Genbank Accession No. AA419260
aatgaataaagaggtttaattgactcacagtcccgcaagctatacaggaagcatggctgggaggcctcaggaaactgacaatcatggtggaaggtgaaggagaaggaggcatatcttacatggccggagaaagaggaagagagcagaaggggagggggaggggccacacactcaaaaaaccagatctcatgagaactcactcactatcatgagaacagtaagggagaaatccacccccatgatccaatcacctcccactgggcccctcctccaacactggggattacaagtctacctgagacttgggtggggacacagatccaattctacctgagatttgggtggggatacagatacaatccatatcaggggccacttccacggggacgggaagaagcagatgggagtagtcctgggcaggtgggctcatggctgtgtgtgcaccctcagttggct

SEQ ID NO: 109 - DNA, 499 bp, Homo sapiens
  Genbank Accession No. AA419263
ttttttttaaaatgtcaataacaagttttatttacaaagtaatcgtcctctcacatcacatttggggttacatgtatcactgttgtacgctggtagcatggctatttgaaagattataatttatgagctattactcagtgggatttttgcaataaggtacttcatgagacaaaatggaaaaaggagaattaaattaaaatgcacaactaatatttatctactacagacataatatttctcagttgtgaactaattactatgcttggaaaatgctagcatcctcataaatattttggttctattgggatacaaaatctgatttcgcaaactttgcaaaggcacattttggctgggcacagtggctcaggcctgtaatcccagcactttgggaggcagaggcgggcggatcatgaggtcaggagatcgagaccatcctggctaacacgatgaaacccgtctttactaaaaatacaaaaaaattagccaggcgtggtggcgg

SEQ ID NO: 110 - DNA, 501 bp, Homo sapiens
  Genbank Accession No. AA420590
gctcgacttttttttttttttgtaagatggatgtagtagaatcatgtcagtattcccaacctccagcaaagcccagcaaataataggtagtcaaaataccaatggatgtacaaaatgagtattgttgcattcttacacaattgctcggtgaggatacaaaggaacagtggctcttgacctgagcccagagaaataacaatgacaactgtcatgaaaacttcccgtgtctgattctagtttagaatcagttatgacccaggagtgccctgactacaaaaacctgtacagctgttacaaagcagtgtcatagcagagtactcagtgagtgaggagcgtcctcactagatggctaagcggacaaagcccatgacaaaggaatgtgtccagtatcatccttgagtggaggaagagaaaaggctgtgagtatatatatatatgagtacccatgcaccacacacacacacacacacaactgtggagaatacgggtcatttctttttc

SEQ ID NO: 111 - DNA, 533 bp, Homo sapiens
  Genbank Accession No. AA420624
tcgacaacagttggaacagtaatcagtttgctaacatatttaaagtcttgaatgttgaagaactcatgtgatttacccttttcaactttttggaaaacgatttaatttattctaattagattaaccctattaatctatggattgggtatcaaaatgaatgccagtccagatgtgcctagacacgaaattggagctgaggactctcacgatatgcaagttcatccaacgtgaagataccataagctttttctctgaaccagagaaatgaaagtcagtttaagaggctgatagatcttggccctgttaaggcatccacttcacagttctgaaggctgagtcagccccactccacagttaggccaagaattagattttaaaacttcatctgtctgtcccagttaactgttaaataaggcctcatcctccactgaagagtatggattgaaggattgtgaactatgtttagtgtgattgtgaacttggtgcctaatgttccatgtctgaagtttgccccagtgctacacgttggagta

SEQ ID NO: 112 - DNA, 447 bp, Homo sapiens
  Genbank Accession No. AA424160
ttttaacttttattaatctttattttaaaacataaccagatgcaccttggttgtttacattctctggttgccattcagtctcaaagtaaacactgggagcatatgataaatcgtagtttaaggaagccatagcacttacagagttctcaaatggttacaatataaaatctgtcataaaaatcagtaaaatatgcaaggtagaacacattttaacactggtacaatggcagtagcagctttgcaaatgtttgtctatatgatttccacaggactttttttttttgcctggcctcattatgtagcaaagcattttttcttttctttttgagatggagtcttgctctgttacccagcaggctggagtgcagtggtataaacacagctcactgcagcctcaacctcccgggctcaagtgattcttccacctcagtctcctgagtagctggt

SEQ ID NO: 113 - DNA, 553 bp, Homo sapiens
  Genbank Accession No. AA426499
cttttacaaaaggtgattgcccattctaagaaatgagcgaatatatagaaatagtgtgggcatttcttcctgttaggtggagtgtatgtgttgacatttctccccatctcttcccactctgttttctccccattatttgaataaagtgactgctgaagatgactttgaatccttatccacttaatttaatgtttaaagaaaaacctgtaatggaaagtaagactccttccctaatttcagtttagagcaacttgaagaagagtagacaaaaaataaaatgcacatagaaaaagagaaaaagggcacaaagggattggcccaatattgattcttttttataaaacctcctttggctaagaaggaatgactctagctacaataatacacagaatgtttaagcaggttcccttggttgttgcattaaatgtaatccacctttaggtattttagagcacagaacaacactgtgttgatctagtaggtttctatttttcctttctctttacaatgcacataatactttcctgtatttatatcataacgtgtatagtgt

SEQ ID NO: 114 - DNA, 525 bp, Homo sapiens
  Genbank Accession No. AA427578
ttttgatctgaggagttatgtattagggataagaaacagtaaacactcagtaaatagtggctattattattatatcatcatcattattaccctcaagttgctccaggagaactcctattcaacctccaaaaccccatgtggtttcacccatcctgcagagattgagctcaaaatcagagaattgtgattttgtgattatttgatgagttcccaaactggggtccttagatcagctgggccatccctgaggtctctcagcatccagctctgttattttcctgggcatgggtctcaggcccggcagtcccgctgaggagtgtgcagacgcaggcagtgtcaattcgaatccatcgccagcccacacgggcctgggcatcagcggtcaatgcccgcacataggactgcttggccttgcactcagataccccagtgcctcctgtcattccccggcagccccttcacctgcccccgggcactttctcagcggtataagcttgaaggggtttcaaagagtactgcggaggg

SEQ ID NO: 115 - DNA, 516 bp, Homo sapiens
  Genbank Accession No. AA429308
gattcaggcacgaaggggaagaacatttgaattgaattcagaatttttctgaaggtgtagatacttttttttttttttttaacagaaaacctgatgtcaagaggtgggcaatagaaatggaaacaaattgtcttcctcaataattaagctactttctctttttcccttcttgttttaatctagtgggttttttattttattttttcttagaaatatgtaggtaaggtttatcttgaatcttaattgccttaattttaaggacgtcaaaggctctcgaggcaagctgtcaacgtcttgttgaaaacaaaaatcaagaaagaattgaaatactgtgccggctttcactggcacagaagtttaagactatgagtttttagggtgaagaaaaaactgtacagtttaaatgaaaatgtttttcttcatttgaagaaaatttgttgataaccatggcaactgcaagaattggaaaaatgctgggacttttcatgaactttgtcttaagtgttgacatgaatc

SEQ ID NO: 116 - DNA, 581 bp, Homo sapiens
  Genbank Accession No. AA430300
aattatgagcagtctccttactgaaggtacagccggatacgtggtgcccccggggatggtgttggcagccccggggaggtgcctgagggtccccacggttcctttctgcttttctgaatgcatcaagggtacgagaacttgccaatggggaattcatccgagtggcactggcagagaaggataggagtggaatgcccacacagtgaccaacagaactggtctgcgtgcataaccagctgccaccctcaggcctgggcccagagctcagggcacccagtgtcttaaggaaccatttggaggacagtctgagagcaggaacttcaagctgtgattctatctcggctcagacttttggttggaaaaagatcttcatggccccaaatcccctgagacatgccttgtagaatgattttgtgatgttgtgatgcttgtggagcatcgcgtaaggcttcttgcttatttaaactgtgcaaggtaaaaatcaagcctttggagccacagaaccagctcaagtacatgccaatgttgtttaagaaacagttatgatcctaaactttttggataatcttttatatttctga

SEQ ID NO: 117 - DNA, 579 bp, Homo sapiens
  Genbank Accession No. AA430314
gtttaaattgttttgttagaaatttcactcgcagttcatatgagtaattttgtgtattcttttttgacttacactcactaaatggttgctaaaaattacatgtcttaaatattgtcttaagtattatctactatgtatctttaacacttttgaatagaacaaacagcttttccattttgctctgctgcagtaaattgcaattgccattcatcattaaatgtgcactatactgtctctagtcttcttgactatgccagttgtagtaccagcttctgtatctgcactgaattctgcctcagtaatatgcctttgtttaaaatttaaatattttttcatttttttaacctagaaaataattataatgaaaatattaagtatctcattttaggattctgatttacataggtatcactgtaacttgtgctgtttgcataggtatactctatcttgtgctatctgcataaaatatccaagtaaacacattgtgattttacatccgtgcatagaaacaaaaatcatctgaactcaaatcaatctgttgatactgactagattggtgacgtgtttatgtgtaacaca

SEQ ID NO: 118 - DNA, 457 bp, Homo sapiens
  Genbank Accession No. AA436185
taactttgatggggacctgtcaatcagctaaagaaaaaaacacgcggggcacggtggctcaccctgtaatcccagcactttgggaatagcattcgtgtttgggggcaactgtaactctctatagtggtgtagaacacaagatgacatggtgatgcttctctttcttggtagaacattccattcgtagggtagagaactgattttagaagctacattcagtgccaagttgactgaatgcgattgtggctgtttaataacgtttttatttgggtatgttacataaatgcccaccagagttaaatgaataaggatttctctggcccttaagtggatgggtatctaggaaaaattaacaatgccacataacatgaaaggcttaatgcaatcatctgaaagtattataaaggaattagctgcagtgtttcacccctctctagtatatgtaggtgtttgtaga

SEQ ID NO: 119 - DNA, 455 bp, Homo sapiens
  Genbank Accession No. AA436250
aggagtggtggtggtggtgtggtggtgattaggtacagtgctttcaatgcagtcttgcagacagaaaaaaaatctttctcaaagcttacaaacatttcccccctactatttccacccttcctcaggccacatgaatttgtgtcacccagataataaagaagcagcatgtatgctcttaattaccagtcaaatataaatcaatactaccctaaattaatggctttctgcaagtctacattaagctgaggtctacatgttggcaaatcagggttttgacttttttttttaaggaaagtttccaaccagttcctttccccctctttattaccagttaatttccaggggtttgtttttgcctttttgttgttgttgttgtttttgttgttgagatggagtctctccctgttgcccagtggagtgcagtggcaaatctcagctcattgcaacctctgcct

SEQ ID NO: 120 - DNA, 656 bp, Homo sapiens
  Genbank Accession No. AA447015
  misc_feature (1)..(656): n = a or c or g or t
ttcacaacccttagcataagattctgaaatttgtaataggtggtacctagtttgatgcagggttttgcagcagttgtgcgaatcgctctgcgcaacggcctttcagtcagactaaatgagaaaatccaaactgtcctatcaaaactgtacccacaataactgtactctgaggcgaaacagagcaaatgtgggtttcctgttttcattgtaaaacattccaggttctcagattgaagagctacattcagctgatagttgacatctgttccctcacacgtagtgcgtctcaacacgggctgcactttggaatcactgaggacctttcggaatcttcggttgaatcatcctggctgtcctggtgatgcttcttatgtgcagctaggctaggagaaccactacaggctgacacctggaatgggagcttgtaacttttacanaatagtagatgtttatcacgttttgcaatttatacttttaaagctatactaggatgagcaagagngtcatacaatgatgtatggcacaaatggttggtgaggctatcatccatgattacaataggtggatatagtgggtggtttgcantgtggcaatggactgcatttggcttaaatgcacaatcccgttccagatgagagaatgcctgaagtgcagaa

SEQ ID NO: 121 - DNA, 468 bp, Homo sapiens
  Genbank Accession No. AA448195
tttgtttaaagcatttaattcttaccacagtcctttgacatcttattatctccattttacagataaagaaacaggcacagagggtttaagtaacatgtacaagatcacacaatcacaactagtaaagccagaattaaagtccagtcggtctgcattcaaagcctgtgctcctgccccaaaatgagaagtaatgacttaaaggcaagaaaaacagaccctcctctacccaccatcctcatacacagacttccagcccaggatctgagccatttattcattttctctcatattcattcattcattcagttcttcatcacacatttagtgaagttctgtcgtggaatgttcacacagaaggtacaaaaatgaggcaggtgtattttctcccatctaacaggggatgaccacatgaagagaactgatgggctgtgtgtcccatggccttacagggcagtggtggagggtggc

SEQ ID NO: 122 - DNA, 400 bp, Homo sapiens
  Genbank Accession No. AA450090
gccaaaatcattaaatttatctggtcaaaaaaacttaaaacttgattttgatcaagcctgtacattactacaatttacagaaaatacagaggacaacagaacatcttagactatagcacatgatgcagacagcaaaacccatgctgtgtgcaactctacaggacaaacaacttcattttctttaacaagtgagttggaagagaaaacaggagagggtacccatatattaaaagaaacttaggagacatatcaacccatcacaatgtgttttcttccttggatcttgattcaaataagttaaaaaacaaaatgaacaaaaaaaagtttatgacatctttgagaaaactggaaaattgatattaaggaattactgttaattgtttaggtatgaaaatagtat

SEQ ID NO: 123 - DNA, 464 bp, Homo sapiens
  Genbank Accession No. AA451665
tggatctctctccggtcgcgcacgcgaggccagtagggagagaagatggtggttctccgcagcagcttggagctgacaaccactccgcggcctcggcacgggctccttggacctgtccagtgacttcctcagtctggagcacatcggccggaggcgtccgctcggccggctgcggcgcagaagaaacccgcggcgaccacagccaaagcgggcgatgggtcatcagttaaggaagttgaaacctaccaccggacacgtgctttaagatctttgagaaaagatgcacagaattcttcagattctagttttgagaagaatgtggaaataacggagcaacttgctaatggcaggcgttttgcaaggcagttggccagacagcaggctgataaaaaaaaagaagagcacagagaagacaaagttgattccagttactcggtcattgagggctagaaacatcgttcgga

SEQ ID NO: 124 - DNA, 528 bp, Homo sapiens
  Genbank Accession No. AA452295
cttttctacttatgaaatagataattttttaaaattgtttaaactcctggaaattaagtgttattttttattactgcagttgagagataccttttcagaggaaaacaagaggctaaattccatgttaagagctaagtagtatttttttcttaacaattttgccaaaatttcttctactggaccaaaaggaaataaatctacaataaatctactttctaaatattatttaagatgggaaatgtcttttataggtatattctgtataatacccttaattagatgaattatcccttatcattccaaaaatgaaatgctgtgttaaatatctccagggcaaagtggtatgttgactgggacaaacgttagaaattgtattgttcattgcacttgttgccctgttccccaagcttgtcaatgtttagagatactattcgggttgctaaagccattattcatagaaaatttctgcccctacagaagtgtgtgcatgggccttggaaaatctacatgtgtatatctgagtagcga

SEQ ID NO: 125 - DNA, 561 bp, Homo sapiens
  Genbank Accession No. AA455877
gagtcaaaggccaggaaggcagttatggagagctcctgcacctccagctgccccacagaaaagcctgcaagagtacttccaggcacaaggcctctcccaccctattccatttgtaagcaagggaggtcgaggaaaaggacatctccaaaagggagcataagaatagccatatatacaggggctgaaaaagtgctcatgagtccatcttttctggaaagcaaagaccagcctgaagcagtgggagctgctgcccaagcggtagtgaactggagagaaacaggccctggattttcagtgaggatgtggatctgaagagtcccccaaatgcctctgaagtctgacatctctgcttagccctaggagtctggttccctgccttcagttgcagagtgatgtgtttgtgtcattgttgatgtcacctcctaaaaagaccttcactttctggctgccacaaagccatatgtgttgctccccatatacagcctgacagagtaaatggagaggaagtgctggatttgtgtatcactggctatcagttcctcatgttgttaagcctcacac

SEQ ID NO: 126 - DNA, 461 bp, Homo sapiens
  Genbank Accession No. AA456099
aaaaaataaaaatcatttatttaaacaaaaatatacacacagtgtacaatgaatatggtttacacagaacaataaaacaaaaatgatatctcttaaatgccaacataaaatgatctatttatgcctagaaaaaatttctaggaatacacattattgattcatctaaaatacatatataacataaaaagaaaacaaatgccaacctttcagatgagtaccacaaaaacctaaaagttaaatgttagattaaataaaattataaaatatccacacgagaagtatgtgtatacaaagtattgtatgtatgcagtgaaatgagagtgcccatacagttatatgcaaacttttgaaagtttcatagttgtttaacaaaatatttttaatgttgatagtgacataaaaacatcacaagaattatctagataatatagcaatattgccaaaatttgagtcaatgttac

SEQ ID NO: 127 - DNA, 591 bp, Homo sapiens
  Genbank Accession No. AA461365
ggtcttctccaagctgaagggccgtggcggtcttctggggaggcagcgttcagggagattactatggagatctggctgctcgcctgggctatttccccagtagcattgtccgagagcacagaccctgaaacctggcaaagtcgatgtgaagacagacacttcctcttcaaattcctggtgattggcagtgcaggaactggcaaatcatgtctccttcatcagttcattgagaataagttcaaacaggactccaaccacacaatcggcgtggagtttggatcccgggtggtcaacgtgggtgggaagactgtgaagctacagatttgggacacggctggccaggagcggtttcggtcagtgacgcggagttattaccgaggggcggctggagcctgctggtgtacgacatcaccagccgggagacatacaactcactggctgcctggctgacggatgcccgcaccctggccagccccaacatcgtggtcatcctctgtggcaacaagaaggacctggaccctgagcgggaggtcactttcctggaggcctcccgctttgcccaggagaatgagctgatgttcctggagacca

SEQ ID NO: 128 - DNA, 544 bp, Homo sapiens
  Genbank Accession No. AA464792
gcggccgcggttttttttttttttttttttaatttttgtagcttaaaattaatttatttaacaaatatagctataatataaatgataataaaatttcaaatatacagtatattacatagtacacacaatcccttccaaagggatgtttgagagccacacaaatgtactgttaaatagaaagagtttttttttttttttaaattttacaattgtgtttctggtactggtaagagagagttcccttcaacctacctttgcaacacatctgtgttttccctgccccccagagcaaatgttttgttgttgaacttgtcttaaattttccaatggaagaagctaggattcatcttcctggctggctagtcttttttttctcttttctttttttgttttgtgtttgtgtttgttttgagatggttctcatttccaaaatcggcagacaccgatttctctgggcttttcttggcgggtgtgagggcagggaaaaacttttcaggagaaagggcctctaagactggtcaaatgttaagtgctggtgggaccc

SEQ ID NO: 129 - DNA, 463 bp, Homo sapiens
  Genbank Accession No. AA479033
ccattttggcaggctggtctcaaactcctggccttaaatgatcctcccacctcggcctcccaaagtgctgggattacaggcatgagccactgcacccggccacttttttttttttttaaagaaaaatgctctgcatggattggagacacagcaataactactgttgccatggaagggttaacagtgtaggagctggtttatcagtccgctttgacatacagctaaaggaaatttatgtttgggggaaaaaggccctctgttcactttaaaattcagtgtggacttatgccaaagggggctgtttaagttgaaagaagccaagttaagtttggcctcttgcctggaatcacttgaattctgaaatttcactgcgacggacatgtgccttgtcacattttccattgcttaatcctgaagtttggtgcaagtctctctgcacctattaaaaagtgatgtatatact

SEQ ID NO: 130 - DNA, 539 bp, Homo sapiens
  Genbank Accession No. AA480009
ctactttgctgttcaatctggaatcaactgacctggctctgcagttgagaaataactaatttagaacaaaattgttaaattttaaaattgcatttctactagaaatagctttggagagttaattttaggtgcgaataacaggataaatgctatctgatcaagcattcatccgaaaaatgtttttgagaattcactttgtgcaaggcaagcatgttggggctggtatatgtgtggacatgtttgatttgaaaaccttcgtggtgtctctgtgtgttattgatcatctgtgtcttttgcttaaaatggcattatttgtaacacaaacctaatatcatatatacaaatatactgtatgtagccaagaacactaaattggtaagacgctttagaaaatatgcatttgaatttgaatatctaatgcctcaagcaaatttattagagtttcagatgaatatatatttttgtaactggcaagtaaatgagtagaacagagctttttgcctaaaaatatttttataagtactcatttacatagtatt

SEQ ID NO: 131 - DNA, 588 bp, Homo sapiens
  Genbank Accession No. AA480075
accatttgcgacttgataatgatcctcgccttttacctggtccacctcttccgcttctaccgcgtgctcacctgtatcagctggcccctgtcggaacttctgcactatttaatcggtaccctgctcctcctcatcgcctccattgtggcagcttccaagagttacaaccagagcggactggtagccggagcgatctttggtttcatggccaccttcctctgcatggcaagcatatggctgtcctataagatctcgtgtgtaacccagtccacagatgcagccgtctgatgaggccacaacccctaggcccctcaggagctttgcagagaggaggacgtgtactccaggcgaggcctctggacctgtgttcctgtgccaaagtcctgtcaggctggtgggcaccaggaaaggcctgcaccctcttcctgctctcccaggaagccagctccctgagctcctgagccagccggaaactcttcctccagccttccggggagaacatccctcccattctgggaaaggaaagcagcctccagggaaatgttttctgccttcctgcttctagaaccacctcaggtactgatgaac

SEQ ID NO: 132 - DNA, 406 bp, Homo sapiens
  Genbank Accession No. AA481493
tttttttttttttttttcatggatgttgctttctttattacaaagggtttcatatcctcctggactgagtttctctgttgttgatgctgttggtgtttgtctgttctatggttgttataccttcttttctgtaggatttggaggcataatctgaaatgttaaataacagacttttatttttctaactagtgtcattctatctttggaaggaaaaaaaaaaaaaaaaaagaagaacagtgacattagcattagcaactctgaaaggatcaagacctgatcttcatagtcctattattttttttctgtttccctctaaaaagaagtcttagctccagtaacttcctaggaattacaatttcagaagtgaccagggattctcaaagggcactttcttagcttccacata

SEQ ID NO: 133 - DNA, 472 bp, Homo sapiens
  Genbank Accession No. AA486366
tcactcttgagaaaaaaacctaagattagcccaggtagttgcctgtaacttcagtttttctgcctgggtttgatatagtttagggttggggttagattaagatctaaattacatcaggacaaagagacagactattaactccacagttaattaaggacgtatgttccatgtttatttgttaaagcagtgtgaatagccttcaagcatgtgaataatcttccatcttccccgccacacatacacacacacactttttgtttctttcaggtagacaccttttaaaatgcagaactaactgaggcatttcagtaactttgctttcaaatcaataaagtcaaatgtatggaaacattttgtgccctactctccataccccgtgtactcaaattctctactgtatgaattatgctttaagtagaattcagtgccaaggagaacttggtgaaataaattattttaattttttttttat

SEQ ID NO: 134 - DNA, 551 bp, Homo sapiens
  Genbank Accession No. AA486731
cattgtttaaattaccatgtttatttatatcaacacaaaatacaataataaacacgacaaaaccattttatcttcatgtaacataactcttcagtgaacagaagtactactgttaatgttttggcctttccaaggtcctgcctggggtcaaaacagtattcagagaaagagcagattcttctctaccttccctaaaacacacacaaaggtaacttctattttctaaaatcccattccaataataattaaaaaaacaacagtaagtccacgtagaggagaggattgctgttgtgttatcagcattgcaacctgtatattgctgtagatttcccccaggttctgcgcatcagtcaggaacataaagggtatatcagcccttcggattttcaaggtgatttttcagtaattctttcacctagccctgtactctgtaaaggtctgatttacctgagttatctagaaaccagcaaaaaaagagtctccaagtgatcaaaggtatatggatctatcttgtagaattgaagaaacttatagattttgctgtgacaatt

SEQ ID NO: 135 - DNA, 597 bp, Homo sapiens
  Genbank Accession No. AA488889
ttttttttttctttttcttttttcttagaatgttagtgatgactgacagttctggtgcacagttacaatgtacaagtgaaatgaatatgatttgcattgttaaggcatccaatctgctggtttatatttatgtgaaagacagaggaaatatacaagcagacttaagaaagaaagtatgttcattgatttctatgaagtttctccctagaatttaatgcacaaaatgcgtcactccaaagggagagattccatgcatattaatagagtaaaacagcattagggttgttttgtaagcttccaaagcaaaggatacatttttttttaaatctactgaactaaatactacaagaataatatgctactatttttttttttgccatatattggaaaaaacttcttaacttacaaataatacaaaaatagacaatgacttttgggtggaaattaaaaaaactgaagcatggtttataacaatacaaaaataactatgaatggaatggtttaaaatcacattggaacagctaatacaagtgtaggtgacccaacaaatacgcacttttcacgtggcaacttgcccttaaatagaagtggggggag

SEQ ID NO: 136 - DNA, 569 bp, Homo sapiens
  Genbank Accession No. AA496142
gtcgttggaaagagcaatataaggagcgagtagaaaattattctaatgtaagtattcatttgaagaatcctgaaaactgttcctgccaggcttgtggactgcatcgctactgtaaatattcagtgcatttatcaggagagttgtataacaccaggaccatgcaaatagataatttcatgtcacatgataaacaggtgttcactgttggcagaatttgtgccagccgtaccagaatttatcataaactgaaacattttaaattcaaactataccaggaatgttgcaccattgcaatgacagaagaagttgaagatgaacaagttaaagaaacagtggaaagaattttcaggcggtcaaaagaaaatggctggattaaggagaaatatggtcaacttgaagaatatctcaattttgcggattactttcaagaagagaagtttgagttgtaacacatttccatcagagaagattttttaaattcctgtaaatgtgaagatcatgattcttgtttttctgtatcatgtgacatgtttgtacattttatctatatcttcatggcaaaatatttt

SEQ ID NO: 137 - DNA, 441 bp, Homo sapiens
  Genbank Accession No. AA501987
caaggtgagcctgatcacagcctcggtagtatttattttgaaataaaagttcccatcccttgtaggcctcgctgtgaggcacaacgtcttcgaggggaagttgaagtggggtcttcttattcactggtccctagaccgcaccttctggtatcttctaaggcaattctggtaccgcactgtgtctgggttggcctatttaaatgtctgagccagctgttccaggatttcaatgagtttctcctcttcggccggtgaggaggacgctgtagcgagaggcaagtgtgtagaaactggcttccgatcttgaaagaagcggccgccttcgttttttttttttttttttttgggaatgagaaaataactttatttcattgtggggagcggggtctgcattcacagacgtctgatgagagatgtgtcgctttaggaggctagtgtggg

SEQ ID NO: 138 - DNA, 509 bp, Homo sapiens
  Genbank Accession No. AA502943
tcaaattgaaaagtatgtatcttcaagctagataatcaacataatcaatattacaattaacagttaggatagcatatacagatcagactggaggtttagatacttggaagcacatacaccaaaattaagagggccagcaactgtcccaccgaggaaaagcactctgactcatcataaacacacgacttctgggaaacttgagctgacatttcacaggacagtaaaccaaagagacaggttgtcattgggttatagaactgatctgagcttgagagggatcacagtgaaatgccattgtaactcaacaatttccccagagatctgttcatctcaaaaacaggaatatataaaaatcagtagtacaaattctcataaaactagaaaagccctttaagccctaatatccttggagcttacataaagactgagttttcatttttcttccctttagtcttccctaaattaaatacaaaatagtttgttatttaggacatttctgactatatagc

SEQ ID NO: 139 - DNA, 526 bp, Homo sapiens
  Genbank Accession No. AA504253
tttttttttttttttttttttttttttttaaacttaaaaatcagtttatcttaaaatttttttgaattagaagaaattgatttcacatgaaaatataacattctgaaggtaagtattttaaacattacaactgttggctgaaatatttacaaagttataataagcttataactggatgaaagcatctataaaaataaataggcaccctagatgtaaaacttttacatgaaataaaatgattagtatatatgtatcaatctgtatctggagtgttgaatcaacataaaaataaatgggcattttctagtttgtgtagtagtacatgagtcaggaggtttcaactggacagtacttaaaagaggcaaaactggacatttctatttgatatctacaactcaactgagttgaaaagacaaatgtctgagactgctgttaaatacaaaaattagtttaaatgtttcaaataatacatttccaactcacatcttaaccaaatagaaaaaaaaaactacacaaactgtgaaag

SEQ ID NO: 140 - DNA, 329 bp, Homo sapiens
  Genbank Accession No. AA508196
ttttttctctttttttttgtccactgtgagcaaggacagcttgagtatttctaatgtgaaaatctgaaatataaaatgcttcaaaatcccaaactttctgagcaccgccatgaacgcacaagtggaaaattccacacccgacttcatgtgacaggtcattgtcaacatgctggcacacaacagttgattcaacatccctaagggaaaaataaaatttccttcaggctatgtgcattaagtttcatttatgaaacataaatgaattttgtgtttagacttgggccccatccccaagatatctcattatatatatgcagacattccaaaac

SEQ ID NO: 141 - DNA, 552 bp, Homo sapiens
  Genbank Accession No. AA513002
  misc_feature (1)..(552): n = a or c or g or t
gagaaacaagcatttgtgtttattaaccaaggagagggaagtcaaagcaatgcagactcctaaccagtccctcctatagtctgcccacctaggccagctgccaaggactaggaagagcagtggataggcccctccccactgccccgaccccagggtgagttctgctgggtaaggaagaggaagtcagcaaaggacagaggccaaggaaagaaggaggaaacagagccgctggggagacaggattgaggagatcccttggcccctcactcacagtggtgagggtatagcccgcaaatgcagccccacaagaggaactaagcaggagtacactcatgtcaaaaaccttgtattgggggattggaggagggggttctcaggtgtcccaagccaagaacaaaacccttggagagtcagtccttgcccaagaatgctggtacagcctctaagcctttgcnctcataccaagttcacaacagggtggagcctctgacaaggccgtctagagaatggatgcaagagaggttcagggacacttgcctctgtcctcgtgcc

SEQ ID NO: 142 - DNA, 507 bp, Homo sapiens
  Genbank Accession No. AA516420
gtatttttagtagagatagagtttcaccatgttagccaggatggtctcgatctcctcaccttgtgatcctcccgcctcagcatcctgagtgcaggcactacaggcacgtgagcaagagaagctgacagattcaaatgttcacaaacatttatgttctattttgatagatacataaactatgtttctcattcttatatactttatattagggcatgggattaaagtcaaaatagtggaaaattagtagaaataacatattttatatccaatttagtctccaaaatcccaacatgcactcttctgtatacgtttttcagtatgcttgactggaacggccaattctacagtagtcttggaagcaacatactgcagattaaataccttagtagcctatgttcttgaatgcggacataaaggagcaatgcttttcctatcttaaaaaaacagtttatatgaatgaaacttctgttctgtttaagatattatatgttgttgagtgtagttgtc

SEQ ID NO: 143 - DNA, 525 bp, Homo sapiens
  Genbank Accession No. AA521373
ttttttttttttttttttttttaaaagttcaaagttttaatccaaatttagacagtgttgagaaaaccaaactttggccatagaaaccattcccctcccgggcccgcaatggggaccagaccacgccccctgatgccctgagtggtcccagatctccggcggtacctccagaccacgtcctcgcgctccgattggctgccgcttttgggcggattagaagctggattgtagcagagtgactcgcagaggccatgccccctcgtcttgtggcaggaccggaggggcgatcccggcatcccaagcgggcccccagggggtgggacctcctccacgcccaatccctcggcgagagaaccccgtggaacccgaattagccaccgggggagatcttgggggaagggttccttgcgcgtggggtccaagaggccaacggacaccgggaagaaggtctccctggagtccaaattttcactggaaaaatttgtgcacttggaagcttaatagccagggtttggaaaggttaaa

SEQ ID NO: 144 - DNA, 583 bp, Homo sapiens
  Genbank Accession No. AA521440
tttttttttttttattaatgcaaacatatttttattaaagaatgaatgcatttatgctaaagaatagcttacatatgttgtaaagcaacaagcatatcttcaagaagtgagtcttcctcaatatgactccatgcttattctacatgcctgaaaactgggcccacacacaggggcacacgtacacgcacacaaacgcagatacggacacacagatatgcagaccgaaatgctgacaccatcgctctctagattggattagctctcatttaaggcttcttaggtgccgcagtgcccctaatattaccaggattgaaaacagacttttaggaaggagcagcattacttcgaaaagtagtcatctgctcttgtcctccaatgtgtgtattttaacaaatacaatttcattctatgttgactctgtgtttataatatttaaagaaccatgaaattaagaaatctcaggattgtttagtgagaacttccattcaaaataaaaaaaagggcattctgaccctagatatctccatttatgttacgcataagattccctaggttagagcaggggcctagaaagccagttttt

SEQ ID NO: 145 - DNA, 721 bp, Homo sapiens
  Genbank Accession No. AA524029
  misc_feature (1)..(721): n = a or c or g or t
ttttgtttggcccaaagtaaacatgtttattctcagttctgccttaggggtctctagttttgcaagcatgagtaaatggaatcaacaataatcctctccttaaatgtctggcattaaaatttgtcacttaagaagtttcctgttttgcctaaagagagtgtgatttgagggtgacctgaaacaaggcttgaggcttgtggacacatagggttaatcgccttatttcctgccaaatcgcagagcagtgaaaggccaaaggaagctataaatagcagcccggcagatctgtccttccaagagggaaagaacttagcaacaaagagagacacgaggggtgaagtgggcaaagaatcattagcccagtttctgcccatgccagggcatgntgacccttgggaatgctgcgaggcccagcagaggaagaagaggatcaaagctttcataacctccaactcagtgcatcccaaacccagacgggcctggaccgacctgtgcatttactcctgaatgccctcagtcagcagacacgggagccatcaggtggggaaacgtgtcctcagagtgctccttttttttgaagtggacacagctccagccaggaatggcagagaggaaaggatcctgcaatngagtggcttctgtcttcagggttcacagacagtcttcgatgacccatgagntgtttggcgctcagcttcatcggcgggcctctctggcttgg

SEQ ID NO: 146 - DNA, 681 bp, Homo sapiens
  Genbank Accession No. AA524095
  misc_feature (1)..(681): n = a or c or g or t
ttttttttttttttttttttaggggtctggctttctctttagttctcatcacactagggctctcagtcacagagaaggcacttaaatgggaaggccacctgatgcaggccaaccatattcaccccccgcccacccgctctgggggaggggagcacaacgacatcaccacttgacatcccccttggcactggtatgtgggtccccttaaccgttagaccctggggagagcccaaggcgttgacctccggaatcgccatgttaggaggaggggcttcagaaacagttggaaggcaggatatcctgggagctgcccccagccagcaggggatcaggcagggggctgtaggagatgggttggcacaggggaaggggacagcttggtcgggcttcctggagatccccaaaccccacagaaggtcccacctcctacagatcccccaaaggcaccggtgaaggatgggcaaggaggcactgatgagctggcgtagagaccccccacacacacttagctggtgggcctagcatatgctgggcacagaaggtgctcaagaaatgtgtttttgaatgaatgtaacgagcaaaggggtgtgatggacagaggacaaggcctgggcanttgagcagcntntgtttccattcagaatatagcagtttaagaatgtaaaatccttgactgcgttc

SEQ ID NO: 147 - DNA, 731 bp, Homo sapiens
  Genbank Accession No. AA524250
cagtatagcaaataataaatttattaggtgcctacaagtacaaaatactgaaagccgctgcaggggattataaagatgtgtaagagacaagccctgccctcaaagagcttacaatctaggcaattagtcacacaaataagttgtgatggcgctctaagtgacctcagcagagttcttgaaaatgttcatatccttcaaattcttctcttgtcaaattacggcgggtgtgaaagaggagagtaggttggcatgcaacggggggggagtgacgtcggctttcgggcgaggggtgggaaggttggagggtggtcggtatcggtatcaagcaggcaggttcggaaacggggggcgttgggttgggtgatagtggtcagtgtgcgatgcgaggaccgttgaactagtggttatgccggtgttggagttagtagtggttgggcgcgagttgtcaggtgatggtgcgttgggagatggatgttgcatgtgctgaggcgagtgatatggaggtgaaggtacggagcttggtgtgttggagaggtgtgtcggtgttggtggtggcgtggatgtgcgagaggtgcgtgaaagggaggtgggtgtgagagtgggtagagggatgatagagaggtgtcgtggataggaagtgtggatcacgggtagaaggtgcggggggatggatgcgccgtggagaggagaggtgtgaagcgcggtgtggtcgagagaagtggaggaaggtg

SEQ ID NO: 148 - DNA, 633 bp, Homo sapiens
  Genbank Accession No. AA524536
tttttaatctcttccaaagcttattttaataggaagtctttatgcatggcatatgtcaagattaatggtacatggaacacattttgtatcctatccatgagtcacacgggaaatcaccttccaggcctttctctgtgaggtctccctgtccactgtgccctgatcaaccctccaccccttcactgtctttacttccctcatttcccttaagcagacaaaagtccaggtctctggtccacagcttcagacatgacaaggaagaggcccagtatcaaggtgaagctgaggaaggccaagggaaagccaggccaagaggcacccgttggtgatggtcacaggagagaggtgatcagtggagccaggtactgggccatcctgctatagatcacactgctgagtttttggttgtatttgttttagaagcagccatcattcaccgagggtggagagaggaaagggaagagaggggaagagaagaatggggagggatattacacgtgtgaagcaaggccaagcagaggctgaaacgcccacccctgacaagctccactgctgcgtaatcctctgcctcagagcagtctcatcatggagttgggctcgtgcgaatcttgctcgaggcaaatcctaaatgag

SEQ ID NO: 149 - DNA, 626 bp, Homo sapiens
  Genbank Accession No. AA524547
tttttttcgagaggaacgcacgttttattggaagtcttggcggcagggggagtctgcgggggcagggctggggaaggggcggcggagggggcggtgggcgcgcaggtggagcgtgggagatgtcaggtgccaggggagtcctggccggattccatcgctccaggtgtttctaccgcctgcggttggacagacggcggatggagctgcggaaagttccctcctcttcatcgggttccccagtcctctgctgctggttgaacttgcaccggcatcttctgctcagcacgatgaggatgcccaggatgaagaggatcccggcgatgacgaggcctccgatctgcagggactggtagtcgtaagtgaacgggtcgtgttcctttggactttctgccttggccatggtggaggagaccacacagaaaaccaagatgtggccaagagacgccattgtccctggaggaattctgctcgctcaggccaccatggcaacagctggccttcccccactcaggggttcacgcaaagcctggcggggtgaggccagctgcacatcgcacaggtgcgctgtggaaaggcacccgttcctctctcgtgcgattctggctcaggcaattccatatgatcga

SEQ ID NO: 150 - DNA, 669 bp, Homo sapiens
  Genbank Accession No. AA526844
tttttttttcactgtggtatcctttatttaaaaattgtgagctgactacagttgtagtgttctcatttaccattctgatggcataataaaccaagagaacattaacacaattccaagaaggcattaacctgtaacacacatatacgccacacatgcacacacacaacatacacgcacacaaaggttatattctgaacacaaaagtgatagaaaaaagctttgaatgcgctaaatcaaataaaaaccctttattataataaactgtggcaatactgtggctatcatgaaaaatattgtaactattttaaaagcaaaaggaaaaatactggcagtttgaaactagcagcaaaaagcagataaaaatagaatggaagataacataagactaatatcaaaattctaatgttgatactgtgtaggattgcactgaagtaattttacattgcaaaactccggaactcttaaaaagtcccattaaaatattaaattgttgcaccttacaaccagtgggaacgcaccaccagtaattgagatgttaccacacacacagagggaatgtattaggtctatcatcaattatggtcattgtttaggccttcaaaagctttataagaaaaatttagtaataacaaatagcacacgccgtaaatccaaaaacacagtcgcgcc

SEQ ID NO: 151 - DNA, 523 bp, Homo sapiens
  Genbank Accession No. AA526961
gtgtttctcttctttattaatcagtcgagagatacaaagacttaataaaaagttacacagaaggttcaaacatcactgagatcttcaggcatcactcgtttcacgacaatggccacctgttaagactatgaaacagaagctgggcgctcacaggcgacaataattcaagtatctttcattccaagtaaacccgacatggaatttcaaacacaatgggctgccaatggagggaacctgtctgtggctccagatttgctgtaacatgtctgaggggcctttgggttaaagttgccacgttagtgggtcatgtctcctggaaaagtgagacaggccccacgaggccagccaggcattttccacagcaagtgccatgagaaggaggtgggcaaagtcctaagaggaaccctccaggtgttccgagttggcaagtgcacaggtagtaagtgggcattgtccccagccgttggagttgagaggatggctaggattttctcctggaaagagagagcagccctctgaagag

SEQ ID NO: 152 - DNA, 559 bp, Homo sapiens
  Genbank Accession No. AA527151
ttttttttttttaagtaatagtacttttaataaaattaagttcttaatagcacatttaatacattaaccctcccccttcttggtttctctgcattttgtgcaacatcactttgacttgattattcttgggtctgttttatttcccgcttttattttgcttttgaaatctttttccttggtggatttgtacgtgtcttcactagatgcctcaaattaagtctgaccacaatcctactctactttctacagtggagagaccatcctccctgccccagggctgtctccacccacgcccccttccccacccgcaccctcgagtggggaaggggaagcctccccaccccagacgctaccatcccagactagcggggtgtcctaggaaagaagagcagggggaatctgtcctaggttgggcgaaaaagtaaattggtagaggggaatgttttggggtctaaggccagggaggggagtgcaatttttccccggcccgggtaagtaaaagaccctaccgaaaacattaaggtgggggaaacgggaaagggggacgggtaaggtcccc

SEQ ID NO: 153 - DNA, 577 bp, Homo sapiens
  Genbank Accession No. AA527180
ttttttttttttagtttttctaagatcccttctttatccacatcacttcagccaacaatctgattggtatttccaagacaacagagcagtatttcaaactcatgaatgggattttaatgtgctgtatggaatttgaagcctcaaacttaaggaactttccacctggaaagcattcttaagtaacatcaatgaactgtcctccctaaaacctagacacagtatcactgtggaaacagagtaatagttctggaatcgattgaggattaggttagaagcgcccacaccaggaaaagcttccgggaaacggttttaggacagaatcaaggcacacctgtggaacctctttctgcatctgtcaaatggggacgctgtgtctcctctcttcttaggagaggattaaatgagccagagtgggctagcacagtgcctggcatgagactacagtttcactgggtgctatactcactacctgggtgacaggatcattcgcattccaagctcagcatcacaccatatacccatgttaacaagctgcgcacgagcttctaaatctcaagtaaagttgcgattaaaaaaa

SEQ ID NO: 154 - DNA, 594 bp, Homo sapiens
  Genbank Accession No. AA527298
ctttaacaaaggtgtgtttatttccatatattgctcattacatttttcttgccacagttttatctaaagccaggtcaaaatctttctctaaggtatttattaatagtgtatgttcttcagatataaaatccctctggtcaacatgcaacatttgaatatctattggcactgtacctctatgagatatttatgacatttgttaatagtgaacctcaacctcctgaccccacatccgaagttgggggcgatgtgggggaacatacacaaaattacaaccacattactggtcaagcactttatagctaaaatctattgactttaaaatagcattgtatgtgaattcagagttttaatgtattttgtggatcaaaaggaaagggtcaaaggctaagctgaacacggagggcactaaattagctaataaggcagctagtgcccctgttcttgccccagccctgtcatatcactacatccgattctctcaaatgttataaagaataatgaacttaaaacttcaggggttcctgaaaactggtattaaattaaaagcagagtagtcaaaattctttgcaaatgacttctgtgatagaaaaa

SEQ ID NO: 155 - DNA, 643 bp, Homo sapiens
  Genbank Accession No. AA533272
gtcgacgcagaaagatggtgaatatggtataaatttcgacccaagcggatcgaaggttctgaggaaagatggaattcttgttagcaactctctggcagcctttgcttacattagagcccacccagagagagctgccctgctgttcgtgtccagtgtctgcatcggcctggccctcacactgtgcgccctggtcatcagagagtcctgtgccaaggacttccgcgacttgcagctggggagggagcagctggtgccaggaagtgacaaggtcgaggaggacagcgaggatgaagaagaggaggaggacccctctgagtctgatttcccaggggaactgtcggggttctgtaggacttcatatcctatatacagttccatagaagctgcagagctcgcagaaaggattgagcgcagggagcaaatcattcaggaaatatggatgaacagtggtttggaacctcgctcccaagaaacatgggccagttctactgaaaaccacatgcatcttgatgcgatctgactttctgaaggagggaggatcccaaatgctcctccagttctgggtcacctgaccttctatgatggagaatcgtcatgtcatcaaactcgtgaggcaggagctattaagggatgttcagctgtg

SEQ ID NO: 156 - DNA, 593 bp, Homo sapiens
  Genbank Accession No. AA534456
tttaaatgtgcagtgttgaatcatttcttcatagtgctcccccgagttgggactagggcctcaatttcacttcttaaaaaaaatcatcatatatttgatatgcccagactgcatacgattttaagcggagtacaactactattgtaaagctaatgtgaagatattattaaaaaggtttttttttccagaaatttggtgtcttcaaattataccttcaccttgacatttgaatatccagccattttgtttcttaatggtataaaattccattttcaataacttattggtgctgaaattgttcactagctgtggtctgacctagttaatttacaaatacaggttgaataggacctactagagcagcatttatagagtttgatggcaaatagattaggcagaacttcatctaaaatattcttagtaaataatgttgacacgttttccataccttgtcagtttcattcaacaatttttaaatttttaacaaagctcttaggatttacacatttatatttaaacattgatatatagagtattgattgattgctcataagttaaattggtaaagttagaggacactattctaacacctc

SEQ ID NO: 157 - DNA, 492 bp, Homo sapiens
  Genbank Accession No. AA534591
tttttttttttttggggggaaggaaacatattatttggaatcaaaggacaataatacgtcaagcaccaaatgctacaaagaaatcatgaaaataggccttaaacgagtcattcctagattaacctccccacatgtgaaaataagtcttggaagtagaaagggtgggtttggttctggtccctagagatgacaacgtgcagtgactgcagttctgcacttctcccctggtgcgtcttttctgagtggctgttggtggctttgcacgtgaggtcacataactgcttatctcgtcaggaattttgcaagacccctggagagaaaaccagatggaccagtgggaaaggccgcccttgcaagttgctgcttcttttgttcttagtgaagatcagaaacgaaggaggtgacaccggtgtacaccccaggcttgttcacctctgcgcagcgaatgccaaagctggtcggtcccactaacttccacaggctcctctcttg

SEQ ID NO: 158 - DNA, 467 bp, Homo sapiens
  Genbank Accession No. AA534688
tttttttttttttttttttttttttgagggaaagacaaaacgtatttattccaggccaggtcttaaaatgcacactgcacggttccctgttgttaacagccccataaggaaagaacgtgccttaacggcagccccacccagagcctgctgcgtggctgctgtgaggctccccatgaatccacgcagtcttcttcctcactggtgcagttggtgaggttttctaccctcacagcaaagggatccttaactataaattcacggtatgcagagaagaggacagaatctgatttactgattgttcctcatttaaaccatggctgaaatctctaccttagggtttaactatctttattttacgggtaaaatttataaaaaaaattgggaaaagggttaacagtcctaaagggggcatatggcataagggtttacacagtggactgacacgagggttaaattccggtcagagg

SEQ ID NO: 159 - DNA, 540 bp, Homo sapiens
  Genbank Accession No. AA534724
taacagctttgtgttctttattgcctctcccttgggctatcggagggaccagcaccatgtccttctggagacccggaaccccccagcaggccagggaggcaaggctgggcgccaggaagccatgcttgaacactaggttgggaggggaacaccccagcaccttggtcctattgaggcttgaagtgcctgcttgatcctgaccaaggggccaagtggaagcctgtgctggttgtggggaagtgccaggctcacatggtccagtaggcatagacgagcgtcaggaggataaagatggccacagagagcagcatgttcttccggttctcttgccgaagaaacttcagttccttctcgtagttggaggctttgttcattaggctgtttttctccttctccagggacctcctggcctctgggctcagctcccggctgtggagtctggagttcacggcctccaggtctctccgacactgggacagcttctcctctagcccatcgatctctagagcgacgcccagattctcccgcttctttttagcc

SEQ ID NO: 160 - DNA, 490 bp, Homo sapiens
  Genbank Accession No. AA535218
gtcgacgttggagacacctgagggctggtccacgtctcacctttgccatacgggtcatttcttgatcaaatatatgactggggtcctggtttactcccgcccaccctttcttttaaagtattcttaacatgaaatccacaaaagcggaaacaatgaaccattcttgcactttacagaatcattgtccttagctttagaggttgttaatttcttgtttttaacatgaacagaatgtgtggttctgaaggtgtgtgggggtctcaagaaattgtcctttggggccgggcgcagtggctcacgcctgtactcccagcactctggggggccaagggggacggatcacctgaggtcaagagtttgagaccaccctgaccaacatggtgaaagcccgtctctactaaatacaaattaggcatcgtggtcgccgtatctcagctctccgagctgaggcggagatcgcttaaccaggagcagagttgcgtgagcgagt

SEQ ID NO: 161 - DNA, 522 bp, Homo sapiens
  Genbank Accession No. AA535819
ggtcgaccacatcgcgcccctagagagcgcagcaactggagcaaagagaaggataaacagaaaggacaccctctctagggtccccagggggccggggctggggctgcgtaggtgaaaaggcagaacactccgcgcttcttagaagaggagtgagaggaaggccgggggcggacaacgcatcgtgttggcctcccctcccactcgcgtgtgtataattattacatgtgatggcctggctggatgcacaagctaggaggagcgtggagtaagagaaagaagggttttgccctaaattgggtcgtagtaacattttcggctcggccgcgattgttggagtagtagtgacccggggattccggaacggttaccggaggctgaacggctttcccagtggtgggtggtgttgaagcttgggtagagcatggggctagatgtgtgccgtggtggaattgttgtcgcgccccattccgggaaacattgagccggtagataaaggggaaacccgggtggctgattattggg

SEQ ID NO: 162 - DNA, 604 bp, Homo sapiens
  Genbank Accession No. AA541622
ttttttgaattttccaggtaacattaattaccaatattatttcaattttccggaagcataattccaatacagtcctttgtgataaacagaagtggaaatgttaatctatttaacaagagaacaccattttttaaaatagaaaagtgtggaccatgtagatattagtactttgaatagaaatctaatgtgaaaatttactttcccttaaaaaaacaaatatttctggaatttctctctagttgtaataactgtgcctgtttgatataactttttttttttgcatatacatacttgagccctaataggttggccctttccaatgtgtataattgtgccaaaatataaaagagacatattcagagataaatgaacaagaatccacgcatttaagaaactccaaatacaagacaaattttaaatcatcttaatggatatttcaacacatgcattggtataacatttaaacctaagaaggaggaaaagtgcccaattagtgtctccatgactggcatgctctctttttagggaaggctttttaatccacagtaaaactccaactcttcctagctatgtgattgagactaacaaacaaatgctttataca

SEQ ID NO: 163 - DNA, 532 bp, Homo sapiens
  Genbank Accession No. AA543076
tcatctacaacacatttatttgtacaatccagaaactagcaggaccaaaattagcagcaatgctgagacatttactggcagctttgccttctaccctaaggtcaaagtacttgagacattgcctgtgtgcctaaggaggcatcacacaaggaaattcagatttaacctaatgtatacaggtctgcgtcatgatggcaaattgaaggtgtcatgatttagctggtttctctggaacattcctttcaggagcccacacttgtcacacttcatgccccaaagggatcaggtgctctgggatgtctacctggaatacatccttgcctcctttcctaggtatgggctccagtaaccacctggggtttgaaatcacagtcaggtacttctgcttcaggttggtcagtacagcttgattttctagttccacaacctcatcgggagttaagtcttcggggcaatgcaaagttccccaatggtaacgagttcccgtaatactcctcgaacaaacctttcccccttcccgagcaaggcccga

SEQ ID NO: 164 - DNA, 507 bp, Homo sapiens
  Genbank Accession No. AA545730
  misc_feature (1)..(507): n = a or c or g or t
ggcacgagagataactaaatagactgaagaaatatgttgcatttgatagaagcaattgcataaatatttggtttctatattanagtctgtgagtaaagtcaantaataaacctaagtaggtataacagatttttaaaccttgaaacttgctttgatggtaganaaaatcattgaagatttacatactgtatataanatgtaaaatgtacgctgcttattaccctcaattttccanaagcaatggtatataatgcagttgaaaaaccaaaaatcttggaaaactaagacgggtcttgtttaaaatgtctctcanctttggcaaccttcnaatcttaatcaactatttaaagcattactgtgtcttgttncctgcatccacaacactctgtttttcnggttaaaaanttgaactgacccgttngggacctatactgttatatttccttgaagaacanatcctatttgttaacctttccccatttttacttaactggtaaattaacacgc

SEQ ID NO: 165 - DNA, 516 bp, Homo sapiens
  Genbank Accession No. AA555312
tctcaataaagcgggaaaaaatgctgaaagaattttttagatgtattcctttcttgtgttggaaagataatcttactgaaacaggaatggaatctagcttatgtctctctttcctattcttagaatcctaaacaaagaaatgaatgtctacaaggtggtttggggaaacagttagaagattcccatgggaagcaagttaaattgagagtccaagaagactagaaaccactttatatcagtgctgggctcacaggagagctaggtgataggagaaagggccagtgatgtggacagatcatgatagtgacagtgaagagagtccaggtaagacctaacgaatgacttaatagatcaactggagtggttttagtggatagggttgcatgtttctaccgacacagaaacctacaaaatagttcactggttttcagaaaaatactggaaggattcatcacaaactcctagccccagccaaccccagtgcaaaaaaaaaaaaaaaaaaaatcatgcccaatc

SEQ ID NO: 166 - DNA, 605 bp, Homo sapiens
  Genbank Accession No. AA557237
gggccgcttgtgactaaccgcagcgcctgtgtgcaacgtggtggggctccggagctcggctctgccaagaggcccgccctggggtgcgcgagccgctttgccaaggggtttccttctcactcagacgcatgatggccccaggtgtggccgcgggaccgagggatggacgggctggacctggctcgccgtaggagacgccccccacccctgggctggagtccagctaggccgctgatcctgcatccccagaccatggggcctccaaacaccttcccagctcctgtcccacgtgtccggccaggctcaggaaccgggctcagctgcactttcctctttcccggaaggttttgaagctacgggaacaggagcagaaggaggagaagctgaggctccagcagcaggaggagcggcggcggctgcaggaggccgagctgcggcgcgtggaggaggagaaggagcgcgcgctgggcctgcagcggaaagagcgggactgcgcaagcggctgctgagcatcctgctgagcaagaagccggacgacagccacacacacgaacgagctgggcgtggcacacggaaccttgctgcagcccgtcctggacatcctg

SEQ ID NO: 167 - DNA, 436 bp, Homo sapiens
  Genbank Accession No. AA563601
  misc_feature (1)..(436): n = a or c or g or t
tttctgaacaataaatgttttatttgctttaaaagtgcctctgaaagggccccccagaagtgagcagtgcgccgtcaagcagggtgtgcagggccacagctgcacggcacagtgtgggtctgagtcactgccggagagggaccagggtggtctgggccgcagccgctttaacaatctgcccttcctgccctgcagaagnaacccattctgaacacaccctggctgtccctggctgccccactttggggtgacaaagaggaggcagccctgggctgagtccacagagaccagccctgatatggcaggagtgggggtggggtgggggagtgggaatacaggagctcagccccagctcaccacggcatccccgaagagttgtgactcagacacacctgggtttaagtcccagctgggagctcaggtaagtcaaatcgtc

SEQ ID NO: 168 - DNA, 218 bp, Homo sapiens
  Genbank Accession No. AA565654
gaattttggtactcagtcttatttatactgaataaggtaaagtggcttaacagaaactagtcttgataaggtaaaccaaataagtgaaaatagtgccaaacacagattcataagcatcatatatatttaatgtcaattgttccaatcttttctcaactccaactttaaattttaatcaagttaatgaaaagcaagcctacattgttattatttaagtc

SEQ ID NO: 169 - DNA, 422 bp, Homo sapiens
  Genbank Accession No. AA568397
ctctttttgttattttttattacgagacacggtctggctatgttgttcagactggtttcgaactctggcctcaagtggtcctcccatcttggcttcccaaagtgctgggattacagatgtgagccaccatggccggccttaatactgttttatgagttctgaattgaataatttttaagtgaatgtcctaaaattctatgacaatccttttaacacaactggaagagtttttgttggcttacttggtttgtctgcatgtttccttctgtcatcccccactcctaggacccatatggaacattctctcttaattaactcttttattgaagtataatgtacttagaggaaaaatgtccaaatcattttcacaagtgaacatacttgcgaaattagcacccagacaaaaaaaaaaaaaaaagtcg

SEQ ID NO: 170 - DNA, 453 bp, Homo sapiens
  Genbank Accession No. AA570519
agtgcgatggtgcgatcatagctaagtgcagccttgatctcctgggctcaagctatcctcccgcttcagcttcttaagcagctgggaccacaggcacgcaccaccatgccaagctggtttgttggtttttttgggggtttttttttgttttttgtttgtttgttttttagtagagacgaggtctagctatgttgcccaggctgatcttgaactcctgagctcaactgatcctatagcctcagcctcccaaagtgctgggattacagacatgagccattgcacccagtcctgagcttagtttcttaagaaaagatgacaatggagtcaagcataaaggcacctaacagagagcgctgtttttatcatcagcgttttctataaagatcatgtcttatactcacctcctaaaacgccaaatttttgcctaaatgtgaacttcaagaattcaattct

SEQ ID NO: 171 - DNA, 582 bp, Homo sapiens
  Genbank Accession No. AA584310
ttttttgttggaaataatttttatttaacagatataaaaaaaattcttaacatttacaaattgtacaaagattggtagcttttatatttttttaaaaatgctatactaagagaaaaaacaaaagaccacaacaatattccccctcataggttgagagaatgtgactatgaagaaagtattctaaccaactaaaaaaaatattgaaaccacttttgattgaagcaaaatgaataatgctagatttaaaaacagtgtgaaatcacactttggtctgtaaacatatttagctttgcttttcattcagatgtatacataaacttatttaaaatgtcatttaagtgaaccattccaaggcataataaaacccgaggtagcaaatgaaaattaaagcatttattttggtagttcttcaataatgatgcgagaaactgaattccatccagtagaagcatctccttttgggtaatctgaacaagtgccaacccagatagcaacatccactaatccagcaccaattccttcacaaagtccttccacagaagaagtgcgatgaatattaattgttgaattcatttcagggct

SEQ ID NO: 172 - DNA, 512 bp, Homo sapiens
  Genbank Accession No. AA584403
agctgacagtttcatttattagtgacatcaagcaccagtccaactatatcatttccactatcctccctccatggccagaaccacagattctctctggcagaaggttggatttatacagtaaaggcatgtgacagtgacacattgtccacccagcaccatgtagggattaaatcaccatttggagcaataaaagggatgtttgttcttcccttgttctctttaccaaccgcagaaacttgaggtgatctcagcagagttcattagacccaggtatcatatgacagtaagaaaaccaagccttagatagctgcagatcctttatgtaactggagttttcaggtcatatatttataggcttttaaagcagaagacgtgagacaaccctttactgcaacccttatgtttgcagtaaaatggatcacaggaaggggaattgacagtccaagatcacaaagatagagacagaagagacagagctaggatgagaacccaggcttcttggctcttctacc

SEQ ID NO: 173 - DNA, 405 bp, Homo sapiens
  Genbank Accession No. AA593830
tttcagccaacaaatatttattcaaggtttgccacgagccaggccctgtgctcggcctgggctggaacagtaagcgaggccacccaggtccttgctctctaggagctcaggttctagtggcaatgcccagcctctgctcaggggccccacacactgaatgagtgggagcacccccaggtgtgctgagccccagattgtttgctttctacctctatgatgacagcaggtcagaggtcgggccacccacgtggcagtcagagtcaggagtggggggtttgcccaaggtagctcacccactcagtggttctttgaaatgcagtgtccctggacacgtgcagggctgccagcactctgaacacgggggtctcttccaggagggtgggctctgattggatgggcagagac

SEQ ID NO: 174 - DNA, 440 bp, Homo sapiens
  Genbank Accession No. AA595800
tcatttcatgaaaattacattcaaaccggtttcttgcctggagaaaagcacaaaacaaaatttacataacgcctttaaaaatcaaaacacaattaacgttaagtttcttcatgcattctcaaaaatccaacaatatagtttaatagaaaataatgacaagcaacatttattgagcgtatcaagtattaaatcactaattctcatcagaagtccagagggaattacgcgagtcccatttacaattaagaaaacagacacaaagaaattacaaattttgccccaggttacacagttactaagtggtaaagacagtatgcaaaattagaagaagaactactatttgaattcatgatttctttattacaattatctactgctgcgtaataaatcatcccaaaatataacggcttaaactaacaacaatcattttattatctttc

SEQ ID NO: 175 - DNA, 348 bp, Homo sapiens
  Genbank Accession No. AA601511
aatagaaggtgagaaaattatacctgggagaaaaaatgtatccacaatttttaggaaattagcaaggctctcgcataaacaatagtttttaaacgatgtcccatagaaatctaaggtactacagaggacatagcagtattaagggataatgaagtcacagcttcagagcctccatcctttctttagcaagttagctctacttgtatctgttctgttttatataatatggttgcatctaactgttttgaaaaaaagttctgttcttcaaaaaaattttaagctatgaaaatcactgattaagtcaaaccctcattttacaaaagaggcaacacaaactcagagcactta

SEQ ID NO: 176 - DNA, 499 bp, Homo sapiens
  Genbank Accession No. AA602521
ttttagttttcatattttattctcatgacattcaacactttgatatgctgtacatatgtgcacctgtgagacacaagaggtagaggaaactaatgctgagagcctcagtgagccaggccttctccctgctgccattcttttcacttgatgggattggttatttgagcttgagcacactaaactagttgagggttgtatggtaaaaggattcctgctgtctcactggggctttttctcaaaccagggtttcttaactccatgtccaagaatggacttcaacggcacaatttcctcaactatagacaaatgtgtgcatatttacaagggtgatttttaaaaatccagtgctttaattagagtctcaaggacagaagaaaaaagtggtaaaaggatcatggctgagctgtgctgcttgatcctggtacagctcgagactttgttttgacccacccacccagaactatagggacaaatcagtacaaatcaaagttgaggacaa

SEQ ID NO: 177 - DNA, 647 bp, Homo sapiens
  Genbank Accession No. AA603097
aaagatatggctatggataatggtcgtagatatcttacaatctaggattattttgaaaacttttttctgagttattcattgtaagactctccccaatccaagggtgaaggatacttggacacaacacaatgccagttcaagttcaagggaagtgttccatcctctttcagcctccactcagctccctgacacacggtgcatggtccagctccctgggattttcccattcggaaagggaagccgtttgtcgagccagcctctgtgaccactcatgatctgaattacccacaggtgttcgaaaatacagagggatccagcataattaagagcattaagcaatcatctcaggcccaaggaggcagttgaagaaaagaacagagtttgggcaacacttggggaaataaattccacagcctttcaccaagttgaaatcttggctttggacacacataaaaatgagcctggcccaatcttagctctcagtggacatctgccatatcacaagatttgacccaattggcctgccttaccatagagaaggccactgctggagcagcagatggtactgctggtaagagccaacgtggacggacagggctgtggcagggaaatggcagagcacagctggccccagcctcgtgccgaat

SEQ ID NO: 178 - DNA, 330 bp, Homo sapiens
  Genbank Accession No. AA609310
tttttttgccctccctctcctgaccaaccagatccaaataacctttactggctgctaaatttctcttgagaaatcaagcaactctctagaattgcagtaataaacgacaatttcttagaaaaacatgtgtaaagtaactacagaatgaagtattcaacccacagaaaggaactgctaacacatgtaacacggaaaatagctgataaaagtctctttggtgccattcaattatggcatccgcagaaacacaaaaatcctcccaattattttagtaaaatcttcatttattcattatttcagaggctgagcaaatggtttgtgtaaacatat

SEQ ID NO: 179 - DNA, 381 bp, Homo sapiens
  Genbank Accession No. AA609509
ttttaacttcaaaaattttattttagtctcatccatcaagggcataggatacctgcatcagctgcaacttctgcttttctcctttgcctctgctcctttacccttaccgagggatatcccatacaggaagccgcctacaaccaaaagctatcttcgccttctgggttgagtgctcaagccaagtgtggaaatgcaagtcactgcttcggcagattgcaagctgcccaatataatctaagagccttctatgccagcctgcagactggagaaggttcactagtgtcacccacttgggttgtcacaggtagtaagcagaagctaactcatcaccgtagccaggtttgtgtactttgtttccagacacgctacagcatagcacgt

SEQ ID NO: 180 - DNA, 364 bp, Homo sapiens
  Genbank Accession No. AA610522
ggtcgacttttttttttttttttctaccactggtagggtaatgaattagaggtaggtaattcggtatgataatttcagaataccaactaataccaccaaagtagaattggtgtcaaattcacaatgagaatgggctgtttcttaattctgttaggtgtcttaaaaagctcatcatctaagatatgtacacattgaaaatttcatatacagctaataacctaaatgttgcccaataaattaaattggctacccttcctattccagatatccagtaaaattggtgatttccaaaagcactattcaaatataaaatgtgaatcttaaaagatttaaattttattgcaaccacagaatgattcaatat

SEQ ID NO: 181 - DNA, 479 bp, Homo sapiens
  Genbank Accession No. AA612864
gtattttttggtagagacgggatttcactatgttggtcaggctggtctcgaactcccgaccgcaagtgatccacccgccttggcctcccaaagtgctgggattacaagcttgagccactgcacccagcctggaaagtatatttatgaaaggtttgcactccacaaaagcatctttgctagggtgtcaaggaagagatcactaaaccaaccccaacacatccatacaattccagcaatctagagagggctggtccttttccttttctggattattttctgttctcagtaaaacaagtatttactgtgatactgaaacactgggaaattaacactgattaagatattttaaacactgagtcttaattataacagaaccagttttcatcagaatgcttttacgtcacattcagtgaagtgttacgctaatatattctacagccctgaagatagaaaaaaggtttctctccaggtatgagata

SEQ ID NO: 182 - DNA, 607 bp, Homo sapiens
  Genbank Accession No. AA613715
ttttcattaaagctattctttattattacaaaatgcttttacaatgctattcttgacaacaggaaaatacttaccctcactgaagtatgtggagtaccattttttggaaaccatgtcaagcataatggcaatattcaggttcaatcttcctatagatctgctcaatatttatctaaaccttagcttctattcttttcacatgttattagttatattttcacttaaaaaattggaggctgaaggggtaagcaaacaaacttttgaagtagacaaagctcatctttaatcaacagaatttagagtccagtctttccaaatctgtttttaacgacagaaacttctccctcccctgccccattttgtcctccccattaaatggtactgtgtcaataaaattcccaagcgacctctttaaatcagcgttctttccgatgctggctaccacagtcatggaaaagggagatgtgttggacaggcctgtcattacaggtagtagttggtggtacatcagtctgtatttcttacacaaaattacatctaaatatttgacatgaggccatttgctatcataagccatcactagggacttctagtctgtctcactcga

SEQ ID NO: 183 - DNA, 564 bp, Homo sapiens
  Genbank Accession No. AA614135
tcagtaaaatttaatcttttattcaaaattagaaattttacttattagaaagtacatttttagtgattgtccaaaccgctagccactatttattatttaaaatctttagtattaaggaaaatacttagttatgcactgaatctccaaatagataaaaagaataatcaactactgtttatatcaattaaaagaaattaaaattcttatgcaattaaaaaattatctctcatattaaggaaatatagtacatgcataattaatgttagctccctttccccatttcataaagaatcatatacccccctctcactcttcctaagaaagcatatgaaagttctagatataaaaatcttaaagttttatttcccctaacattatttgatcataaagttccctggtcagtagaacataagactttttcaagttatccatgaagtaaagtggttcagaaattttcagtggattaaatccatcttccaccaactgatgcttcaatagtttgaatgttcctgttgcttccattttttcctgaattcttaaaaatcgtggacaagcataagctgg

SEQ ID NO: 184 - DNA, 398 bp, Homo sapiens
  Genbank Accession No. AA621478
aattaagaaatcagatttaatcataaacttgtgaaaggaacaaattcaatttttaataacttttatatcaatggaagaagcattttcaattggcaaaactagaggtttctccctaattttctgtctgaatttttataaataaaatgcattatttagctgaaattttaaaaatatttttttcactagacgttagagcaatcttagattttaaataaattgttaagtatcatgaacatgttatttaagatttaaaataaagctaagatttgctttacattgtggcaaatatatacattttagaaaacaaactttgtatttagtcaacataatttttaaaataactaggttgtggatacacataattttctgcagtaattgacgacagatgaaactacatt

SEQ ID NO: 185 - DNA, 494 bp, Homo sapiens
  Genbank Accession No. AA625387
aaggaactggaaaattatgctgaaaacacacagagctctcttctttacttaacactagaaatattgggtataaaggatcttcatgcagatcatgctgcaagtcatattggaaaagcacaaggcattgtcacttgcttgagagcaacaccatatcatgggagcagaagaaaggtgttccttcccatggatatttgtatgctgcatggtgtttcacaagaggactttctacggaggaaccaagataaaaatgtgagagatgtaatatatgacattgccagtcaagcacacttgcacctaaagcatgctaggtcctttcacaaaactgttcctgtgaaagcatttcctgcttttcttcagacggtttctctagaggactttctaaagaaaattcagcgagtggattttgatatattccacccatctttacagcagaagaatacattacttccattatatttgtatattcagtcatggagaaaaacatattaaaataa

SEQ ID NO: 186 - DNA, 252 bp, Homo sapiens
  Genbank Accession No. AA625897
ttcagctgttcaagcatcactatggagtctcggagcactccctttaaacgatgggcctgatctttattcttctgaatagtttctgctcttgacaccatatcagaggctaaatttaaagatttctcttcttggaggcggagacggtaaaaggactgagcagcatgttctatctttgacagcttcagaaacagtgtcacattcaacaaaactaataacaacacaaaaatactcattaccacaataagagtgacg

SEQ ID NO: 187 - DNA, 483 bp, Homo sapiens
  Genbank Accession No. AA628024
aaagaaaatagcctcaagagtataatgctaaaccaatgtaaatttttctaaccaagagggagtgggaaaatgtggggcaggggtttccagcatccagtgaatcagactaaggaattctgctctaacctcaagttagagcaagtcggctatttatttcctttattcaagttgcatctggggaactatttcaagctatttataaagacatcctttttttgattatcatactgtacaattatctgctttatttggtttcccagagtatccagctaaaaaccatgactgtctcttaaaattttcttaacaggtatatattaaactgagtgcttttgccaatttaaagacttcatgttgaatataaactattttgatgcaggctctggtacttattcctgcagatggttaatacttctcccatttgttaagtctggtaattatattacaaatagtaatattactgattctgacagtaagatcagctag

SEQ ID NO: 188 - DNA, 548 bp, Homo sapiens
  Genbank Accession No. AA628405
ttttttttttttttttttttgaaggttacagggaagattaaacatttatttagaagttacagtgtttgtttttacagagatatgttgccacggattattgattctggaaggttttttaatgctcatagtgctgtacacatcttggtctgttctcatgggcatcttaggaaaatgtttcccgtagcaccggatccagccatctgtgtgggtgtctccaggctgtgataccgtgccccttgctgttccctcatgctcgtgatgaaccatgtgcctgggatccttcctcttgccagcttatctgtgggcctcctgcagcctcgcctgccactgcagaggccccaggttaggagtctggtccggggcaacctgtggcgttgctttcctgggtgactcctgttaggtggcagcttctttattttccctctccaacctcaacgggtaggactccttatgtctctccagaattataaaacatatacatttatttacaagtgcataaatatataaatatggctataatagaaaaataaataccaattttctctgtc

SEQ ID NO: 189 - DNA, 520 bp, Homo sapiens
  Genbank Accession No. AA628467
ttttgacagctggaataagcactttattttttaaaaatgacaatagaaaagtacctttaaacagttataaaagcataatagactgcagaagtggctattttccttaggagaacagtcatctcaccaagagccgattggactgagggcataagcaggtccttgaacaccaaagtggatccgtcacaagtccttgagctaactgccttttccccttatttacggtaagaaagagcccctcactcctggccttggttttttgtgttgacctttaaaagcttcttgacatctttatatttctaatggaaaataacaaaacaaaaacccaaaccaaccaggtaatcatgacattgaaattttcaacataagccgagcggatcaataggaaagactgtgtttggcagctgaatttaggtcagtgtggttttacaaaaatggcttctgtacaaggggagaggttgagctgtcatgaactctggagatgtgtcaactgacaacaccagactgactttggctttgacga

SEQ ID NO: 190 - DNA, 541 bp, Homo sapiens
  Genbank Accession No. AA629715
  misc_feature (1)..(541): n = a or c or g or t
acttgaaaacatatctgggatccctttttttggtcctctgctgatattataaaacaagaaatgcttcttggactaccttcactggcatttccatagtcctggaatccagagccaagtggcctatctaaaattcacagcccttttattctcctgtgtgatggttaatacaacacagttgaagcctggaaacactaccattatttttggtgtattgctttttctaattgactgtttttaatgattttgatacattttaatgttgaaattaatattgaatgttagctatgaaattttagtattgaattttataatggaacagaacattggtaggtaacaagatgcaagaggatgtcagtacaagattgtctgcctgnttttctttgtaaattgtaattacagtttttgtaacttgtgattatggttttaactaaatataccagcagaatacaacactacttcgtacacagagtagtgataagctatatcattaagacgtgaaaggaacatcacctaacatactccccaagaaattgagaggtca

SEQ ID NO: 191 - DNA, 588 bp, Homo sapiens
  Genbank Accession No. AA631047
acaggaggaaaaaaaaatttaataatatatgtttgcacaggagttccacgaaatatgagactccaagaagggtcagatgattgacactcatacaccatcgtgagctatcgaaaagaacggcagtttgggagttctgcagggagttgaccacagaagtgggagagtgaagggaagaagtgtgtcgtgaataaagcttggctggttttcagataaaaggtcttgcgagtggccaggtgtggtggctcactcctgtcacgtcccagcactttgggaggccaaggcgggcggctcatgaggtcaggagttcgagaccagcctggccaacatagtgaaaccccgtctctactaaaaatgcaaaaaattagctgggcatggtggcaggcactgtaatcccagctacttgggaggctgagacaggagaatcacttgaatccgggaggcagaggttgcagtgagctgagatcgcgccattgcattccaatcccgggtgactgtgtgagactccatctcaaaaaaaaaacggaggaaaaaggtcttgtgagtaataaatgttgtctggagcagacctcaggagaagaggtgagagtc

SEQ ID NO: 192 - DNA, 491 bp, Homo sapiens
  Genbank Accession No. AA631215
aataaattcttttattgagatgagagacggacacacactgggagggttttgttttttgttgttgatttttttgtgactgagtcccagtactcagggaggctcagactggaggcggcggcaggcaaggcggcggcaaggctggtcccctggcgctggggccgcgcatacttgaggaagactgcggcgcgacccggccgggaacctcggagcgcacgcgggccatgcacggctcgagggtgcccagttcctcggggctgcagcagggagatggagaaactgaggcagggcaaggggttggagatgacccatccttggaactggagactggaggctgagaagaagcgtcgatgtggttccccacggacgggtcgggggctctcttgagatcgggcacgcgtcccgtcttcaactggagtgactaggcgagcaccgaggagaggtggacaccctattcttcctacagggcgcggctagtgcggaagtcagaacac

SEQ ID NO: 193 - DNA, 570 bp, Homo sapiens
  Genbank Accession No. AA633203
gtttttacagaaggagttcaaaatttatttataaatttgtgtaaaagaatataagacctttttcttttgtacatatttgtaccataaagaaagtagggattaaaatctaaaaagacccccaaagctttcaaaacctgatctgagaattagataagaatatgtcacttagaaagacaagcctgtagcacccatagctctgattaacctgaaagcatcaagtgactccctctttttctaccctaccaacatcactctaattatacttccaattagaaaaataatgtagcatttccctggcagtagagtttaaatatgagttcaggaatcagctcctccaaacatgcataaatgaggacaaggagaagccagtcactcctgactgcacggtcaagtgtgtgggcagttgaaattaaggtaaaaacagtgaggctgaacaaaatcacattaagaaaaagcatctcatgaggcttttcgaggtcagttgatgaaggccagataggagtcaatattttctcatataccccagctgttaccgctattcatattccaacagcctccagattgctcgag

SEQ ID NO: 194 - DNA, 538 bp, Homo sapiens
  Genbank Accession No. AA634799
tcttttctcaaagttcctgccttgctagactgttagctctttgaggacagggactatgtcttatcaatcactattattttcctgttacctagcatgggacaagtacacaacacatatttgttcaatgaatgaatgaatgtcttctaaaagactcctctgattgggaggacaatatctataattgggatgtgaatcatttcttcagtggaataagagcacaacggcacaaccttcaaggacatattatctactatgaacattttactgtgagactctttattttgccttctacttgcgctgaaatgaaaccaaaacaggccgttgggttcacaagtcaatatatgttggatgaggattctgttgccttattggggactgtgagacttatctggtatgagaagccagtaataaacctttgacctgttttaaccaatgaagattaggaatatgttaatatgatgtaaattgctatttaagtgtaaagcagttccaagttttagtattcgggggattggtttatgataatttttcccctttg

SEQ ID NO: 195 - DNA, 515 bp, Homo sapiens
  Genbank Accession No. AA651733
actgccctgcaacaagcgtgccgtgcgtgcttgtggccaagggaaggaagagctggttgatccacagatagctccttcctccccgcaccttcctttttgtttggaggtcccaggatctgtgttcacagacatctgggggaagaaaaggagcaggaaactaccccgcacagagttaagcaggaaacaacaacaacatcatgcaaaaaccctgcaaagaaaacgaaggaaagccaaagtgcagcgtgccaaagagggaggaaaaacgcccgtatggagaatttgaacgccagcaaacagaagggaattttagacagaggctgcttcagtctctcgaagaatttaaagaggacatagactataggcattttaaagatgaagaaatgacaagggagggagatgagatggaaaggtgtttggaagagataaggggtctgagaaagaaatttagggctctgcattctaaccataggcattctcgggaccgtccttatcccatttaattaatttctctgaca

SEQ ID NO: 196 - DNA, 589 bp, Homo sapiens
  Genbank Accession No. AA658561
gcgtcgacctgtggtagatcttgaaatcatattgatatttggccctcaagctatttttgttgcattatagcatataggcagcagctctgaagcttcagtaacactaagaaatttatgtgtaaatatagcagtcagggaagagaattttaaaaaaggtcattattgaagaagctgaggggacagggtagagctgctgcaatatggagatttagggtaatatggcaaggtcctgctgcttgaagcctgtgagtgggttgtggatatgggactggtggagagtgagactgttaggaaagttgtatctatgaataagggcagttgaagtagaatttttaccagtccacctgaccttcttcctccctaaccactggctcttgagcagcttgggatttccctggccattgccaatacctggccatctggcttccaatagtacagtggctactcaagttcaagcgaagaactgccagactctggtgactgttacttccagaggcaccactagtgcatatgttgggaatctgggcttcaacatgatggatgctaagaaaaaggaaaaagaaaaagaagtccacgcggcgcaattagt

SEQ ID NO: 197 - DNA, 395 bp, Homo sapiens
  Genbank Accession No. AA663786
aatttttgaataattaacgattttacaaggaaaagggaaaagagaattccaagaagtcagttaacctagcagagcacagcaggacatagggcctaacggaacgtttgtttatcactctgaacttcaataaaaatgagtcattttaaaattttaaaaaagtatttaaggccgggcatggtggctcacccctgtaatccccagcactttgggaggccaaggcgggcagatcacctgaggttaggagttcgagaacagcctaaccaacatagagaaatcccgtctctactaaaaatacaaaattagccaggcatggtggcaggcacatgtaatcccagctactcaggaggctgaggcaggagaatcgcttgaaccaggaggtgaaggttgcagtgagc

SEQ ID NO: 198 - DNA, 537 bp, Homo sapiens
  Genbank Accession No. AA669106
ttttttttttgtgaaaaacatttattctgagaatctaaaatctggacaaagtactggactttagaaaaagcctacacaaaattgtctcattcttccctaatacattaataatctaagaataaggaggtgaaaaaaaccctttaaaaataacattgctccagtttgtctgcaggtatgtgatttaaaatatccctgttttattgaggtataggctgcaaactttggtaaaattagaaaaattaacaaaccctttcaaaagaaaaaaaatacaaaaacaaaaacaaccaaaccctaacgttatatctttcttggtacatatacagtaactacaaaaaaaattcatttagaaaatgtgttcattaagagaaaaaaaaaataaaaaaaaaccctcttgtaagttctcacttgctgagttaaaaaaattgaatgtaaatgatctataaggctcaaacggttcccaagcacccatccggtgtcaggaagaactggatgaccgcagtttctagaatctggttgacattttcaataattcagtgc

SEQ ID NO: 199 - DNA, 384 bp, Homo sapiens
  Genbank Accession No. AA677864
agacagggccttgctctgttgcccaggctggagtgcagtagcatgatagttacaggaaaggggtcccaatctagaccccaagagagggttcttggatcttgtgcaagaaagaattcagggtgatgccacagtgtgaagtgaaagcaagtttattaagaaagtaaaggatgaggggcaccgtggctcactcctgtgatcccaaagtactgggattacaggcatgtcccaccatgcccagactaatatttacttttaatcagactaagatagggttactacttgagttgctatggctccagctgaaagaaagcccgtgcagtcatatcacgcgtaaacatttgctttatgctaaaaatatggtggacctggcattacagctattac

SEQ ID NO: 200 - DNA, 519 bp, Homo sapiens
  Genbank Accession No. AA700621
gccagacagagtctatcatgatttctggtgtagacaacattctccctctcagataggatcccttgagtttcatgatcacctttcttatcctattatttggagtactcatttaagagtcacctactgttaaggtgactcttaaatacaaatacaagacatcttttagacatcttgaccataaacctgtgagggcagattttcatttgctaaaataaataagagggcagtgtcgttgcatgcgttccatattttttgatggccaggaagagtcctggagcctacaagagatttatcaggaacagatgagcagcgtctgacttaaggccacatcctcaaagatgctgtggagtgggtgagcacgattcttactgagacgccccagatggactgtgttgggggttttcatgatttttttctacttttgtttagtgaaacaggaatggatttacaaaaatgccatcatggatagcataagagatttcaaaagtctttattctttttcttcataggctcaagttt

SEQ ID NO: 201 - DNA, 310 bp, Homo sapiens
  Genbank Accession No. AA701188
aagttccgggatacatgtgcatgccgtgcaggatttgttacacagggaaatgtgtgcgtggtggattgctgcatccatcaacccatcactgaggtattaagcaccacatgcattagctatttatcctgatgctctccctcctgtggccccgctccccgacaggctccagtgtgtgttgttcccctcccaaaggtatatttttttacctggaaagtaaaaaaggtaatttactttataaactcaaacaacacttatcaaactcttccagaagcatccagttcccctgcaagttgtattttggttctacttt

SEQ ID NO: 202 - DNA, 445 bp, Homo sapiens
  Genbank Accession No. AA701600
ctgaatgtaaaccaaaaaggcttaaccaagacttactaaatacactctcactctttcactttaaggcaatttattccagtatacttagagttgggaaaattgaaatactaatttctaatatgactttgtcaatttaatttttaataaaatgttttaaatatttattttcatgaaattttgggctgcagatttaactaattcaagtcataaaaacttgcattgcattatacagacctctccccacttactccaacttgacttttgtctacacacggctggtggcaacaattcacagccactgccaaagaccagcctctctggtttcacgtgggcaggtccatccctgatgctgcactcaccctgggggcactgaactatgaagcagtgaaaccaccaaggctgcctctgagagctgccaagtgctacatcgggtaagcaagctgcc

SEQ ID NO: 203 - DNA, 398 bp, Homo sapiens
  Genbank Accession No. AA701619
taaccatttttctgcatttaaaagttagaagatttgaagcattctggattttcagcttcttttaagatatgagaaagtatctaacagcaggcctgtatggctggttcctgccgggccctaatcctcaatgatgtctgagttttggcacgtggggctcctgttcattgttctcccttcacatggggcctggcagccccagttccaaacagagaaaggctagtgtgtccctacttgggacatggccaggggagggcggtacctgctgtgccatctgggggggcgatcttcatggggtacgggggcacatgggcagtgtcgggacccccatctttgcaggggcaggtgaacgggatgcgctcctggttgcaggcaaacttgatgaacttgcacagctcctc

SEQ ID NO: 204 - DNA, 577 bp, Homo sapiens
  Genbank Accession No. AA703262
ttgtatttaaaaatattttattttttttgaataggtgatacatatggtacaaaattcaaaaaaatacaaaaggagatacagtgaaaagtctcccaatcctgtacctatccaccctgtcaccctccccacaaaccaccattggttctaagaatttatcctgcagatgtaatcccataaattaatgtgaaatatgcacaagaatattcattacagcattatttatagcaaaagacaggaaacaatggaaacgtctgagtgagggactgattaaataaattatggtttatccattcaatggaatagtatacagctgtaaaatgaaatgaggcagctctaattgcaagtataaaaaaaaagcaaagtgcagaacagcatgcatagtatgctatttgtattttaaacaaaggaaatatgtatatatgcatacaatatctcaaggttggcaggaaggtggagattggagtgttgtgggggcagtgggaacagcagttacgaaggtgtagtgccagcaggatatatttgggggatggtaagttctccgatggtgaggtataaggcggagtggcaaggatgaggt

SEQ ID NO: 205 - DNA, 923 bp, Homo sapiens
  Genbank Accession No. AA704137
  misc_feature (1)..(923): n = a or c or g or t
ttgtggctgagaatgctggagatgctcagttctctccctcacaaggtaggccacaaattcttggtggtgccctcacatctggggtcttcaggcaccagccatgcctgccgaggagtgctgtcaggacagaccatgtccgtgctaggcccaggcacagcccaaccactcctcatccaagtctctcccaggtttctggtcccgatgggcaaggatgacccctccagtggctggtaccccaccatcccactacccctcacatgctctcactctccatcaggtccccaatcctggcttccctcttcacgaactctcaaagaaaaggaaggataaaacctaaataaaccagacagaagcagctctggaacaaaaagtacaaaaagacagccagaggtgtgcggagagggtgaggtggccgcgtggacgtgggtagataatcgcatgcagcactggaactcctgatgaggggtggggtcccacttctcctcaaggtttgaaggattggggggaaggggtcagctgactcagagaagtaggatctctgcactggaacttgaggcttctgtctcctccatgggccccacagtcacagggacatgaaatccgtggcctggaggaggagagggagaacagagaagcagcgcccagaggtgttctgagcagcaggttgatgccctaaaattaacagtttgtcttttagcactgtgtacttcttggaagagatgngttgggaatggcacagtggtggagattacacatttaagttgcccctctcctctgcaatggaaggcggaaaaaaaagagccctccatgtttatttcccgggaaatttttttggaggagggaaattgttcccgagaccccccaagggcccaaaaagccgtgtttctttttttcacggggaaaggaaaaccaaacacgagagg

SEQ ID NO: 206 - DNA, 440 bp, Homo sapiens
  Genbank Accession No. AA705188
acatttactgatggaaaggtgaaatggtagatcgaagccagacattaaaactgttttaaattctcacttacttggacatagaatatcagcagtctcaaagtcattcacccggcagataggcaaaaatgagtcccttgaagatgaagtacaaaaagactattgaaaagtattttgcacattaaatgctaagctataggatataaacatcttattttcagaaaaagatttctggatatatttcttaaggtcagtggacgaagccagaattctactataatgtataaccctatagcactgaaatctattttttctgtatattaatcatgtagtcatgcaatactaaagtatagttacagattctaataaatagtacataaacttggtgacactaagactcttttaagaactcaaacctcttcacaaagacggtaaacaatttt

SEQ ID NO: 207 - DNA, 949 bp, Homo sapiens
  Genbank Accession No. AA706612
ttttttttttttttttcagtttgacattagtcttttattataaccatattgaatggggtcgctttgccaaaaggagaaatcatttcttaaatcagtatgagttatagcataaagatggatgagaaaaaagcgatagggcatacatggcgtcactgaatattccatcaatcaaatgaattgtgccactgtgagaaaaactactatgacagcttttacatcaaagtggtctcaagcctgtttatacgaactttatatatctttttaacagtataaaaagagagctttagtaagtaacactgagaaagcagtctggcctttgagaaggaagcctggcttgacgtggaccatcctcaatgtatccggcctcttctctctgctcacaagcctccccagtgcacctcctccagacaaacagggcaggggccagggcagggttgtgtgtccgcagaacaggagggatggaattggtttgagccgccacagaacggccactctatgtgggggactaagtactccgtacacactcctgtcctatgatgaacctgggagcagttacgtaagaaaataaattaaaacaaaagtagtgttcatcaactcgaattaacgggtattccataggggtcagcatgactccacagagttttgaaattgttacagctctgctgaaaagtaagagggggaattcctgttgggagagggggaaatagaccccgaatccactgaagtgggcttcttagtgaactacgagagatgagagaagaagaggataagtgtggtctgcgtgtggagtggaaataataggagggggggcctgtgtttatttgtagaaggagaagtctgttgtgggaggagttatttctgcgcaggagtggcagttactctagacgatagagagagggaagcgtctgtgagagagagatagagttatatcaagtgttagtatgtggat

SEQ ID NO: 208 - DNA, 527 bp, Homo sapiens
  Genbank Accession No. AA707213
acatattagaactcaatgaagaattatttaaaagagaggaaaggcagtgcagggctggaggtcctggagggtggcggcgggtcgtcctaactagcaggctgaaaggtgctggaggggatgccttcactcagaggaagttcacagccacctgccttggaacatgtacctgttcatcttttcgtaatgttagtattcattttgctatcttcctgttgccatttccaaacagtgtcagtatgtttttgttaaatacgaacatttaaaacatatcgtatctgtaagcctatttgggtgtcttcatttcatgcccgcactgcaccataatgagtaccacacaaagccagaggatgacacttcctccagaggtctcactgcacatggagaggttagccctggcattaagggtccttggaatctctcagcagtcatagtcagtcagatgcaccaagggcagctgagtcaatctcctttttgtaacaacaggccgttcctgcggttctcagtgctgccaacctgggcatactgaa

SEQ ID NO: 209 - DNA, 566 bp, Homo sapiens
  Genbank Accession No. AA707308
ctaagaaagcctataaaaaggtttctgaataaagactgaacagtagtcacagtaagtaaacacaattttaatttacaaaatatgattttgctgttgcagttttgatacgtatttccagtgtgtagatccgttcatcgcacacatctttgggttgaacaagctccacccgtcctcaagtgctgaacaccccaagctgtggccccgcttggaaggcagtgcttctgaaggttcccagcagatctcttaacagaccacagttggaagttagcgtttctgccttgaccagcaacatactcatcctattttaacatggcgaaaggtcaccaattaatcttctcccttcccttgggtagtagctccttgagggaggcagaggacggattttaaaacccatggtgcaaaaaacacaagagctgtggtttgcagtccttcatcagaccacttgagaaaacaaagggactgttgtcaggaacgggattacttactggccagaaatggaaaaaggctaacaaaaaggtatgatggaaataatttctccaaaccttccttgtagccccgaaaaaaag

SEQ ID NO: 210 - DNA, 475 bp, Homo sapiens
  Genbank Accession No. AA708740
tttgaataaataagcatcaattttattgaatcatgaataatttaagactggtacaatcatcagctttattctctatgacatggggcatgatgtccagcagatcattggcaaatccaaaaacctcatgacaaatgaaaattaaataggtaggaagagagagagaggaggggaggaggaaggggagggaggatggaaacataccgtacacaaaatactcaattcctagttttctctttaaaaatggctagaaaaaattcatcaaaatgcagcactttaatcaattatttacaatttctatgttacaatgaaaaaatgtacatcttatagaacatatttcataaaactgctccactggaaacaactagatcaaaacagcaaaccttccatttaatatccacaaagttggattatttttcctttttgaagtagattcgccacaatcaaatttgaatacagagaattttgaagtttaagc

SEQ ID NO: 211 - DNA, 463 bp, Homo sapiens
  Genbank Accession No. AA719022
tttcacttggctaattcttttatttttttaaatagggatgacatttctccatgtttgtcaggccttggactctctacgtcaggtgatccatccacccacctcggcctcccaaagtgctgggatcacaggtgtgagccactgcgcctgacccttgcaggtacttcttaaagctatggggttttcccagagcttggtagcatgtgtgttcaaagggctatcaatgttgagttgtcctagcaggcactggatagagagcaggatggtcctgatatcatacggggcagaccacttctccttcaggatgtccaggcatatgttaccctgggtgtccacgttagggtggtagcagggtgtgaggaacttcactgtgggtgcatcgtaaaggtgggtagtcattgaggaactccagcaagagcttatacctcagatcttcatacactgtagcagctgcttcatggatggt

SEQ ID NO: 212 - DNA, 491 bp, Homo sapiens
  Genbank Accession No. AA723692
gattctcactttcatttattttcaaggcatatacaaaagtctgacatggtgcaatgatctcatcaagagataacagaacacacaggagagggttgggtttcctccccggcccaaccccctcaggaaggcacagaaaagtgaggcttgggttcgggggccacctgctttggaactaatctgctgctcagaaggccaggccccttctgaagagggatctcttcctcacatccagaatctaggatctggggaaggtaaactgaggccaccagtaagcatgtgctccaggccaaggctgagtctgtgctgcatccatgtcatcagccacccaagaaaaaccagttactccacctagctcatggtggcggcatcctccctgcaatggtgcatggggggcagtcctttcccctgcaggttgtcaatgccacccccatcctcatcctggagggcagtccaggctccgatatgagtgactaggggtgaggtaggggtgg

SEQ ID NO: 213 - DNA, 530 bp, Homo sapiens
  Genbank Accession No. AA741298
tttttttttttttgcatttttaaaaaaaaataagtttatttacatttcacttactttcaaaaggatgaaaatatatttataaaggaagtagtctcattttatttaacccatttgcatttgacttagaatcagaggtctaagggtacccaaagaatttatccagttcaactttccatttttagctaagactgaaattataccattgcaggcagatgaaaatctactccacttataggtaaacatcaactaatatatatgttataaaaacactagctttagtaaaatctgtcataacatccaataaatctgcaataaaagacatagctatcacaatataagacattaaaaaatttatgtgcagcaataaaaactggaatttatacaggagaaatgataattggctactaagtcaatagcatcacagtaacagtacccagtgtctttcttattcaagtatacacgctatttttaagacttaaaattaagtcttaaggctataataaagatatcagtagctaggatgtatatac

SEQ ID NO: 214 - DNA, 526 bp, Homo sapiens
  Genbank Accession No. AA742697
  misc_feature (1)..(526): n = a or c or g or t
gctcttaaccacgtttattgagaggggccgggggaaggggatggacggtcctccccgcggcgggtatttcagccctcgcgggtgggcagcgtcttgtcctcaggtgtagatgctccagtctcggctcagccaaacactgtcagggcccccagcagggccttcagggcattcacggccccacggcctggggacccagctcagccacacacttctgggagccctctatgaggtggttcacggggatgcccaggctgctcagcaggagcttcagcgggttgagggtgccgagggggttggccagggtcccggccccgggctccggcgccgactccagcgcagancaggcttgggcacaggctttggcggagccactaagaaaagcagcagcggactgngaacaagggccacgcagagccccaggaaggggccgagctttcatggcgccggggctcggggcgcgccgggaacctgcggctgcccgggcaaaggcaagaggcttctttataccggttcttggccctcgtgc

SEQ ID NO: 215 - DNA, 555 bp, Homo sapiens
  Genbank Accession No. AA747315
  misc_feature (1)..(555): n = a or c or g or t
tttttttttctttaaataacaatttgacaaaagggtgaagaaatcctaaacaaggtattgaggccagtgtccaggctgcattcagttcacagaactgtcctcaggacgttgcatggaactggaaatgtgtataattacagaagaaaacagggaggacttagtgcagagaggagacgagtgtggacgggcaacagcatccttagtctttcatatttatatatggtatatgtattttctatatatatatttatatattttacatccaggtatcccagtcatctgtaccatttcccagggagacatgggtgcttccaaggcgagacaggaaagggttaggcagggaaggggcagcgacggtgcaggctggggcttggctcacagaagctgcaggagcttcagcagctgtaagagggccccgggctccgcagacgccaggtactgagncaaagccagtcctccagctccacgccccgcctgcgatccaccgccttctccgcaaacttcatcatcatcagggcccgcttcatgtcgatccagttgtgcagcgtgcgcaca

SEQ ID NO: 216 - DNA, 503 bp, Homo sapiens
  Genbank Accession No. AA760767
tttttttttttctagttggagctgggctgtattggttcatgtgggttcgctcccaccctctatcttaggcatgaggcccctgggatgtaagcaccttggacccaaccccaagtcctaagtcaggaattccaactacctgaggagcccagggcagaatggcaggaagggtggaggaccatgctctggcctcagagctgaatggcactaaggaagtcctcatgatctgagtcctgaaggaagcaaggtgaggtgggaggtctggggggtgagaggatttgggcccccagagccagctgggccacactgagcttcccgcccttgtgcatgaggtagagatggaagtggaaaccgctgccataggtagcatgcctcagggaccagccataataggcttgggcatagtgtctggtccgaaagtggggggcagcagaagtcattgagataaaccggcctccagggacaagcacgcggctcacctcactcaacacctggtccacagtgtg

SEQ ID NO: 217 - DNA, 440 bp, Homo sapiens
  Genbank Accession No. AA766775
ttttttttttttttaaataactataaataatattaattagaatttatggaatgcacaattcatggaattcaccagaacacaagaaacctttgagacagtgttgcagtattcacttctacagacaaggacgacccatcctatttcccctgcaaagacagctgtccttccctacgaaggattttaaataattctcactatgctgctcgccgatcatccccaaagaaatattaatttacaaaataacccaatatccatataattcttttgacaaataaaaatcttaaattaaaaagcatgattctctccctctccccaccccctttattccaatttcaggtagcttggcactgagtaattgaacattaaaaaatcgagtttgtagacttcgtacagctgcgtttggtgctctgagctgatgttctggaagacttctgtggtca

SEQ ID NO: 218 - DNA, 529 bp, Homo sapiens
  Genbank Accession No. AA772278
tttttctgatgtggtggtaactttttgagggataatgaaattatgttcagcctcaaaaccctgaaaattaattataatgctgctcagtcttgcttatgcatttgtttgctctaacatgctctttccattaaaaattgttaacttcctccattgctgttaaaaaaattaaaaagggatggaaaaaagagagagacaaaaaagatgaaaaaaaaaaaaaaaaaagaaaggaaaaggcaaaagcacttccctgggggaaaaactgtcagatagaccgatagtgttattgttgcatggttattttaataaaagtattcttatatgttatattattaacaataatttaattaaaaacccaaaatactctattgtttcatttctcttttaatatttctctctctcctctaagaaaatgttgcaggaagtttggatcctcttggtttccagcaaaacaagagaataaaacttccatgcaacccgatggcaatacgaaaaaggagttcatattgtttgcagtgacacaagaatctac

SEQ ID NO: 219 - DNA, 508 bp, Homo sapiens
  Genbank Accession No. AA773348
ttttttttctttctttttttctttcttttttttttttttttttttttgagacagggtctctctctgtcacccaggctggaatacagtggcatgatgttggctcactgcaacctccacctcctgggctcaagcaattctcccacctcagcctcctcagtagctgggaccagcaggcccagctaattttgtattttttgtagaggcagggtttctctatgttgaccaggctggttgtgaactcctgggctaaagcaatccgcccaccttggcctcccaaagtgctgagattacaggtgtgagccaccatgcctgcacaggaatttcttttaagagaagaagtagctagtgatggcagtcgtaatggctggcatttattaagcatttgttctctgccaggcaggatgcccagggagcagcgtgtcctgtcgtttcattcctcatttatcacatgctaaaggcaaccacatgagggggtgcatgttactgcgtctttctagttgggaagtga

SEQ ID NO: 220 - DNA, 479 bp, Homo sapiens
  Genbank Accession No. AA775180
atgttgcccaggctttcttaactcctgggttcaagcgatccacttgcctctgcctcccaaagtgctgggactataggcgtgacacctcgcccggcccataaatgattttatgcttgtagtaacaattctaaaccaggggttagcaatctctggcataaaaaccaaagagagcaaaagtcaacagtgaagacttaatggccagtgcataacagtataatctcccttgattcaagttaacattttccagtaaacatttcttgagtacctgctaggtgccaaacagtcctacctggatcagcatttcctacacctacacctcctgacttgacacacagaaaggactctcaggcttcatatgaatgctgacgctgataccatatacccaatacactcagattttgaagtcctaaaactatgagtggatactacatattagtactggcaaaattagagttaagtttagcagaaaaccatgtaca

SEQ ID NO: 221 - DNA, 513 bp, Homo sapiens
  Genbank Accession No. AA775711
ttccaagtctagatctataaatatatttattataatataacaagaacttaacagtaaacatatactatgtacaataccattacagagaaccctgttttatatcattcacagaaatagccagttttgctccagtgtgatagatgaggagagaaacgaatttcaatgtcatctgtgttgagtctcgctgacaactagaacctcctttggaggcagacgcacaccaatgctaacattagccctgccccaggcagttaggaatttgtgctccagtccttgggttcacacttgcaccctgtttgacataaatactttaaatgacatacaatgtatgtagttttgtgcttattactttttaaaataataaataatattaaaaactgcataacgaagctcggtatcttgtccaagtgggagccacactcgtagtgctagaagttgatgcccaacgttagaactggaattttgtgtcatcaaatactgaacgatggaaagcgtgtcctgtctttttctctt

SEQ ID NO: 222 - DNA, 602 bp, Homo sapiens
  Genbank Accession No. AA776393
  misc_feature (1)..(602): n = a or c or g or t
atggtgcccgtgtgtgcttttatgatcaccttgtcctcatnttgtccctccctctctactcttccccttcccggcttgacaggtccagcctgccctagggtcttaaaccgcagtatcaatccttctgtccccttagccgctccaggcgcctgcgaatgtccgggggcaccttggcccagctgccagcagtcgcgcagctctgtttgggagtcttggtgagcacgaaattgcaggggaaggggccctcttcaaaggtgacccgacagttccgtgtcactgaatggtagccctcggcactggcagtcaccatgtagtcccctggggtcagcagacgccaataatccccgccccacgccgtggtcacgtcatggttaatcccatccacggcaatgacagcgtagcaatcccaagctccgtgtccttgtccctcaccattcctgcaatgcccatgggcacctgctccaggtaggtgaggagggcgtctttgttgttctcccattctggggcaattcattctcctgaagggaattgttacaggacaagctcacagtgaccctcaagcaatttgtgtttaaggaagccgaagtaattaaggtccccgg

SEQ ID NO: 223 - DNA, 501 bp, Homo sapiens
  Genbank Accession No. AA777369
gcaggatgttgtccaagatctctccccccaccccccagtccccatccctactccaaaaaacttcctccaaagcctagaaaacactttcagaaacatttgctggctgtaggctggcttgcagaacactctgtagcaacctaagtcaggaaaacaggctgaacaatgtagtttcaagtgcagaagctctgtagaataagagaagaccgtgtacagacaccaccacccacctaggccccaggacctagactctccttagcactgctctgctgagggcacaattcttttgcaaacacgctcctctcttgtcaaaacttatccagccttcccagaacctctttggagaggcaaacttgcctgctctgctgtctgccatgagctctccttggagaggagcctgtttgcttaccttccattttcttcccccagcagggcatgtggcaaaagagaagacaatagtgcaggggtgggagggggggaactgctcagagagagagagagggg

SEQ ID NO: 224 - DNA, 505 bp, Homo sapiens
  Genbank Accession No. AA778816
gcaaggtagagattttcataacatctcaataatccttttgaaatgtgcagttgcttagtgcaaaaaaagaaatagtgccaccatttcttcaactaaaagataaggtgtgctttgtaaaagtaaagcatatccaattttcatcctgttggtcggtattaccaagggtcatgatgtagctggcgcacaaatgtgaagaatcatttactacctgtagagtggcagtatatcttagatatcatactttttattaatcagttcagtttctctagctgcagagagaagttctctaacggacttcaccaatagggcaaaacacattcccattccagaaaggcacataagaagggtgcttctcaaccctcaagacaagcacacaccaggcaaggaacggtagctgaagtgcatctgccctggaccagcatttccacacccttcagaccaagttccatttaaaggtgtatgtactactttcaaaaggaccattgggttattttcttgtgacccc

SEQ ID NO: 225 - DNA, 528 bp, Homo sapiens
  Genbank Accession No. AA779101
aattgagcaactttattcacataatttctacaccaagaactcgaggttatctctgatggaaccaatttcactaatatttactttaagggcagagaagtcaaccaagtcctcacagtctcaagaatcaaaaacaaaacaaaaatacaaacagagagcaagtgggaagataaataacactccgaaataacctagctacacacttttagtttccaatttttctagcatgaaatcacttttctcttccatcctgtaagacgtgttctctcctctctcttctgagttgggctgtgaagagctgccctggtctcccggtctgacggtgttgtccaccccatctgaggcacccagggaattgccctggcgtccggagccctggggttctgatagcctgggtctttttgcagggaactgatggtccctcgtgccatccctcgtgatggcacgagcaacacatgtagatgaaggagcctcaattgcagttgagcccagtagactttttctgcaccccaggggtgatgatggcaactt

SEQ ID NO: 226 - DNA, 604 bp, Homo sapiens
  Genbank Accession No. AA779795
ttttctcatttcccaatatttaattttgtctgaaaaggatacattcccggcttccctcccaccacatcactccggcccaccagcagtgacacactcgcacgcacacacgcacataaggccaatgggctacggtctgcttctgccctctctggctgggaagaaggaatttctctcttgcctccttcccccaacaaaggtaaagagaggggcccgctggaatgccagctcccagggaaggacacagagccccacacactctatcacatcacatgcacttagaaaaataaaaccaagtggtgttctggcatccccaacaccgtaagagagcaatatccacctggaagtcatctttgccattttctagaaaaatttattgcacttaattagcagatgttaaaggagctctggagtagagctttgccatgaaaaccagatgctcctcggccctttgcgttccaaggagcacggtttcagagggctgaaagatggcagtggaggaggatggtggggatgctgtggaagagctggcagactccttcccttctagctctgctacaggcagcagcaggttgtgggccatcctaggagtctctcctccaaagcc

SEQ ID NO: 227 - DNA, 1007 bp, Homo sapiens
  Genbank Accession No. AA788946
aattttcagtagttttattgaaaaatgcctcttttgtttcagaaataaataatataaggcagtgaaattcacaatctgcagttaaaatataaaagcagcaattctatgttcatagtcttgcaaatgttttccaactacttttgataactaagaaatattatattctgaaaaaagttcatactaaatatacaacacaaacatgcaattccctctctgcagaataatctgcaatttggtataaatgttagtgtgtctaaaacaaggaggtttaaggcaatatggaactgtatcccgttgatgcactaacttcatctacatggcttaaggtttgtggttgttaaagagatgtatacgagcattctatgccccggcgtataaccgagatggaggaggaagataagtaattgcaatggagttgacgtttccctcctttttggttttaggaggggaattatttgaatcgtggtgtaattgaattgaaaataagtatagcaaaagataaactgcccgctcgaaatacacagcagctctgggttccaggacttaactgcttaacctaagagtttcactgaggctgcccgctgtgctaactaaaggcacacggcatgttctctctttgcggctttgttaacaagtattttgcagcatttcagggccaaggcaaatgtctacgactgcgtgcttggactagcttccgcagaacaagttctcacaacagaaaggtactcgggagagcacgctggagaacactccgaaagacggtccgcccatctgaccgaaagggaattcacactccccaacccggcgcgcgcgatctcgggtcacgccggtccttggcaggcccccagcgggtgggctcagaggtccttaggtcattggcgtagcccgattccgcgcgtcggtcacggccagaaggccgctcaaagaagcgcctcggcgagggccgcgataacttcattgggcgttgaggccccacaccccggaagtatatccggggggatccgtaa

SEQ ID NO: 228 - DNA, 633 bp, Homo sapiens
  Genbank Accession No. AA789332
tttaataaagccacaaatatagaacttttaaacggatgtctcagactgtaagcgaaggacaaatttgtgagatttggggtctatgaactcttcagagagtatgatgaatggaattttcttcacattgactacgaggctgaagtccaagcacttaaggacgaacacaattccatcccgtaatccattagtcacagcctcatcactgacaagcctccactgtgtagagagccagcggtccttgtcatattgcagggtggggcccgcactgaggtaccgttctaggaaggccttgggggtcatgccgttggtgatgcagaaggccaggtgctgcaggatgctctccatgctgtggtagttctgctgccgggtgatgcgcaggtacttctggagagccctggccatggaggggaaaatggcctgggcggcctccctagggtccatcacctcccctggggctttctgctgctcctcagcctggagacgctgaatgtggatgaaggcctcttccactgcaaccaccagccttgctttccgcttctttactcggcgttcatgttcggcctcttcataatacaactcgttgtggcttgagtccctgcgccgagcagctgcagcaatcatggcccgggactt

SEQ ID NO: 229 - DNA, 569 bp, Homo sapiens
  Genbank Accession No. AA806965
tttttttttttttttaaaaaaagtgttttcccctttattacagaactgatacatatacattattgaacattaaaaaatacaaagaagacattttaagaatgcaattaccaaacattttcccatccaaagataatcacttagttttttggtgtatccttctccccgccacccaactcttagtttgcaaaatttcaaacccacagcaaagccacattgatagtacaatgaacatctgtcgaccagtcacctagagtcaccaagtgttgtcattttgctacatttgacttgtctctttctttctttatattcatatgttttatatttttccacttagtcactggaaattcagtggcagacactgtggtaattaatatctaaaaacttcagtatgtttgctaagaacaagaatgttctcctacatagccacagtacaaatgtctcactctgaaaatgaagccgggcacagcggctcatgcctgtacacccagcatttatgggaggccagggcgggaggattgcttgagcgcagggagtttgagaccagcattgggtaacaaagtggagacccc

SEQ ID NO: 230 - DNA, 460 bp, Homo sapiens
  Genbank Accession No. AA807154
  misc_feature (1)..(460): n = a or c or g or t
tttttttttttttttttcctgttacgccgtcaatgcagcaggcaatgaggggaatgacacagccctctcattcccggaacgtagtcaatctcggctctgcggatttcacagaacacactttgcctattgccggctccaacaagaagtaactttccaggaagctgccggcccccgcngnccaggagtcgctgcctgagctggctggccgcggggattcacccgggaggcggggcgctggggaaggctcgcggggaatacagcacactttcccctaaatccctcgtccgcgccgagtgcagggtctcagagttcacctagtccacctctcacccacaacagtttataaatggggaaggtcagacaagttagtagcagactgggtctagaaccaggagttcgaatgcatccgaggctcatatcgagactttagttgtcgattcgagtttattgcttttcctct

SEQ ID NO: 231 - DNA, 422 bp, Homo sapiens
  Genbank Accession No. AA813827
tttttttttaaacattaagattttattacaaaccaggcattatatatttctttacacttaaggaatagatatgaaacaatcttggagtaaaaattagaaggcaacttgcttcaagtttgtaccaagtcaatcaagcagaaacctgaagaaccttgttttaagatgagagtcatttatacttggcaggcattttcttccaatgaaaaaataaagtcaatgtgccattatcttgacacttataaaaatgtttataaaaagcatttaggccattgattctcacagttggctgaatattggaatcacctagattaaaaaaaatactaatccctatacaacatccccaaaattcagatttaattagtgtaagttaggccctgggcatataggctgttttaaaattcctcgggtgagtctaatgtgta

SEQ ID NO: 232 - DNA, 888 bp, Homo sapiens
  Genbank Accession No. AA824349
  misc_feature (1)..(888): n = a or c or g or t
tttttttgccatacacatgcctttatttagatcagcttttttcaaaatgcagccaaacttatgagttggacagcccaaagtaaccagccctattccactgagttagtttaccccacagcagtagaacccagtgctggtttggttcctggcccatggtgggacagcgtgaaggtgatggagggctctagcacaaggaggtgctgagtgccaccggagggnctttctgcagacagcctagagcaaggtaagcaggagcactcgcttcagaaccgaggcggctcggaccagaggcaggcactttcctccacatggcaaagggacaagggtttgttcttcctacctcattgctttactaaagggtcaggctaggcatgaccgatcaaggatgggtagggggtaaaatggaggaggaacatgactgatgaggtgcctggaagcctgtaggggtgtagctgctgggtcctttgaggtaaatggctttggaaatagagggtgaaactgaaatcctgagtgatcctgcatggctttggatgaggccagcctggttcaggcatacatggtgagctgcagccactccagaacgttgagcctgatgataccatctccatccttggtcaaatgcatgaaaagctctgaacatgccctccagccctaacgaagcagcagattgaaactttcaaagtcgatgttcatgtggttgtctgccgtacgactggtaaatgatgtcatagagcgggttgttgaggtggaatcctgcgtcgttaatgcatttcgcatctcgtagccagtgatggtgccggactggctcggtgtaatgttgttgaaaatttctcgccagcccttaatcttgtcccgaggtgggtgaactcccgaagggttggctttccc

SEQ ID NO: 233 - DNA, 559 bp, Homo sapiens
  Genbank Accession No. AA829286
  misc_feature (1)..(559): n = a or c or g or t
tttttttttttccacctcttaagtatttattagatacccattgtgtaccctctccccgctttgtatccctgccctgagggctncacagccagatctcctgagagcagagtgaagaggaagctcagtatttctcaggcaggccagcaggtcggaagtgattggggtctttgccactcctgccccattcattggcagcctgatcggccagcgagtcctccgcaccatggccaaagaatctctggatattctctctggcatcgctgatcgcttctgcagcccagacacccccaggtccccttttggcagcatcatagttcccccgagcatggaagtatttgtctgagccgatgtaattggcttctctcatgtcagagtaggctctccacatgtcccgagccccatcaaaagcctcgccaaggaacgaaaagaagcttcggctgctgacacccaggaccaaggagcagaaaaccaggcccgtgagaagcttcatggtgctctctagatcagaggagataagacaccttcagaatggtatggctgtatgcccaggataactatt

SEQ ID NO: 234 - DNA, 416 bp, Homo sapiens
  Genbank Accession No. AA830307
  misc_feature (1)..(416): n = a or c or g or t
tttttttttttcactaagactttatatttatttttccataatgctccttcttaaaagaagaaaaaatataaaggcaaaggtaatatatgcttcttttagtcccttatccaataaatcaacctttaactgcaaataggttttacagttaccaaatgatatgttagttctgtgccagcagaatttattacttttttgctttcttgttctggtgttaccagtaagttgaccaaatgacactaaaatttaaggacactatcacttaaaacaacgttttgaaataaaacacagtaaaaagaccacacccagtgagtcaagtgcttataaatataaaacaagcataattgcatagattaaataggagaaattcagattcagacaaaataaaacaccaaatttaattaaatanatgaaaagga

SEQ ID NO: 235 - DNA, 492 bp, Homo sapiens
  Genbank Accession No. AA830844
  misc_feature (1)..(492): n = a or c or g or t
tttttttttggtataatcagtgcttcataaaggcatcctaatttttatatctttaaagacaacctaccatgaaataagaagaatccataattataattctaaaaaccatgtaatcaacttgtgtccatgaactcacgcatagcagcatcctctactcagggacacattatgttgctatgaatccttttaagaattctttgagtttttcttcctttctacttctacctcattatatctacacctttcttaactaccttgcagtcaaaagccaaactacctgggatgctgctcctctagtttgtcttcagctaaggatagaggcaaagaatgagggacggggaggaaaaagggagcagggatacgagaaacagaaaggaaganaaaagaatccttttattttcaccctctcttcgcccattttttttcttttcccttcactgtacatctaattcttttgaccacttcaattttcatcatagtaggtagagcaca

SEQ ID NO: 236 - DNA, 314 bp, Homo sapiens
  Genbank Accession No. AA838843
ttttttcaacactagtaattttatttcaaaatataaatatttcacattattaaagaagttacatcagtaggttgtcaaagcaagttagttatgatacagcatttgtgtgagatcagagggtatttattgtattcgaatattcttttttacttttgtattgcctccttcacctgagaacccaggtgatgttacattttcatagagttatgtaagcaattattacgctatatcaaatcttagttctatatctaattgtactggaaatacttttcagttacctatatatgtggcactgcaaagggcaaagaagggtt

SEQ ID NO: 237 - DNA, 489 bp, Homo sapiens
  Genbank Accession No. AA843926
ttttttttttttttgggtttttggagcacattttattttacaataccagagaatcaacatctagtagtagcataatacaaaatgaaacaccaatctatttaaaactcatgtaatgggaactgtatttcaaaaatgataagaaaacaaaataggagatttagagaccagtcgatataaatgtataaaaagcccccaaaactctcatttcatcatcagtgcaaacaaaaatcatttataataacatacatatgaatacattcacttacactcacaaagtggattatcatttttattttccatgaaatatgtcaaatatatgcaagtatatcttcacattctgatgggcaagataaatcttcaaattaaaatatgtacatttcacttaaattaaccaaaatattaaaaatagcagcaacactggtctttaaacacgtctaatatcccaagagattgttcacacaatatagactattttggtagctctttcat

SEQ ID NO: 238 - DNA, 310 bp, Homo sapiens
  Genbank Accession No. AA844007
ttttttttttttatatttgcaacatatttattcaacaaaggaaaaattaactggaaaaagacagtcggattaatcaatatgcaaacatctgaagggatattacataaagaaagatatcctaacagctagcaagcatgtaaaaatgcccaacctcgttagctatcagggaaatgcaaattctgactggcatcattaagtgttgctgaagatgtgaaggaaatggaatattcacacattactggtaggcacgggcattggcacaattgctttggaaaaatgtctgacaacatatcttaaaactgagtatgtg

SEQ ID NO: 239 - DNA, 464 bp, Homo sapiens
  Genbank Accession No. AA846091
ttcttaaaaaggacttatccaaataatctggataataaatcgtttgcgtttcctaagaaactgggtttttcttttcccttgtggttttggtgtttttcttcttctttgagccttactagcggtctgaagctttctttctttcctttgcctttttgcttttggacaggagaaagcagtttgtctgaattgtacttgactcttcaaagaggaaaagggcgtggaagcagaagggggcttagggagaaaggagaaatcaataacggaggaagaaaacgagaacggaactaaaacccatggaacccagaagttgccgggctgagggtgggggggtggagggagggcctcctgcctgcccgcccccaaccaactgcctccagaggcttcagccccatcttggttcctgcacagagatctcaggccaagagagagagagcgggggtggagaaggaaactctgggccctct

SEQ ID NO: 240 - DNA, 415 bp, Homo sapiens
  Genbank Accession No. AA848010
ttttttttttttttttttttttttttttttttaagaatttgacatgtattttcaaatgcagtgagttaggcagaatgaaagcagagtaacaagattttacctactgcttactttttcattttacatgtgtatttaatatgttcaatgcagcaagaattgctgatattattactgtgagatgacgtgtaaaaataacactaggaacaggtagtatacatcaagaccaacacgaatgcattgataaagatggaaaacacaagagaaaaacattaaatagtcttattacaagaaaaaaggataagggttaaatgattcaaaatctaaacaaaaattaatatacagatatactgtcttccattcagtgcatgaaagaattatctggatataaaaatcaagtatccttacattctgggtt

SEQ ID NO: 241 - DNA, 712 bp, Homo sapiens
  Genbank Accession No. AA875998
tttttttttaatatagagaactgattatgttcacttgtaacctgtcattccaaaattcttcaggatgtttaatgttcaagtgtccatattcccagtcccactggatgcctggcaggatgcaaccatctgaatgagtggaagtataatgtttgcaccaggtattatattaggagccttgaacccagaatatgtctgattaagtcttttagcccaataatttgccactgctgccaagtctggtaattttgaaggagaaagttcaaccataacggggtgatacagggcacccccgtactcaaaaaactttcaaagtgctttctaaacaagtttctctttctccttgaatacaacgtcagtcacaactgatggcagtacaatcgatccatccatacactgctctaagaacatcttgatggtataatatgctgtcattcatgctctacctgctactagtttaatttggtcaagtagctctttccctggagactcaaattctactagactcaaattctattagaccaaagacaaatgatctcagccatggtcttcacttaaaccaatcactgggcctgcattataactgagcaacaagtggcacaataccatgtgttggttgctggagagctatcatcagggtgctgaattgcttctgaacctggagactgctggcacgattctgtcacgtgacccctactactatgcccaatgccaa

SEQ ID NO: 242 - DNA, 409 bp, Homo sapiens
  Genbank Accession No. AA884688
tttaataatcaacatcaaaagacatatgcaaacagcagtttaagactgggtttcttaaatctaccaggaaagtctgtggtggatttgactagggggtggttgaaaagccagtcatttttgtttaccaaatatacagtacttcttaatttataactttataaatgtgtcaacttgttttacccttatgaaaatttaataaatttaataacagcaaaagatgcatagtctgaaaagagtatctggcacaccattcatgaaagtattcagtatgattatcaagaaatataaatttaagagaacaaatacaatcactatattctaaatcaaacatttcacatttcactcaatatcacttatatagcctggggtaagcaacattaggtccaactcttcagtgactcaagttgtc

SEQ ID NO: 243 - DNA, 441 bp, Homo sapiens
  Genbank Accession No. AA903473
tttttagtctttcagttttaattttattagtgacaaggtaaataggtacatgaaaatcttcacagatatctacgcacgtatttaaataaaacaagagtcgagttctaagaatgcagtttcaggggtgactagtacatattatttttttatttactgtataaaaatctccaagtttataaaacttaatttgccccattattgtgtcttaaaacccagctgcaagaatttaaaaagggaattctttgaagagaaatacagatagaccctcagaggagcacagcacattatgaattatgaaggcaatcggcaatgctctaactagaatcagataacgctcagtgtgttctctgtcgtcagtatgttctctgggcagaacggattgctggaaggtttgcctgacctcagtttcctccctttctccatttgcttccatattctttt

SEQ ID NO: 244 - DNA, 461 bp, Homo sapiens
  Genbank Accession No. AA905481
tttctcctcagctgcacacaataaacaaagagtttttaaaaacactttttgataagtacagcagcactggcaacatcctactgcttggtatcatcttcacttgaatgggtatttttctttcttctcttttaaactcaagattaagacactgtctatactgatcacattgcgaccttctcctccagaattccatgctagagcaaaaatactcattagccaagtagttttgaacaatataaaataattattaaagagaaaatttatgctgccattcacctagctacctaaaaatatacttaataaaatatacaaaaacatattgacacacacaaattttggtaatttctatcactggaaaattacaagctaaagctaaaataataaatacataaataaatgcaagctctaaagtgaacccaagtagcatcatatttcatacacagggggaaaaatcattaagt

SEQ ID NO: 245 - DNA, 359 bp, Homo sapiens
  Genbank Accession No. AA905874
aattagctgggcatggtggtatgcacttgtagtcctagtcattcaggagactgaggcagggggattgtttaagcctaggagttcgaggctacagtgtgctatggtcacgttactgcaaaaaggaaaaaaatcaagaatatggaccctcgaaagtcaagtgaaaaaagtatatcaaaaaggaagaagtgacaaaacaatgtcaagtaacacgtcaagaaaaattagaactgaaaattaaaaatttatcactggatttagctgttggtgaccataagagcgtgggtacagtagagtggtaggcgaaaacgtctggtcagagtaagaaacaatgggaggaagagaaggactgctaatagcga

SEQ ID NO: 246 - DNA, 553 bp, Homo sapiens
  Genbank Accession No. AA909042
attgcacagatttttttaatttttatttattttttttaaacaataacagaggtcaaccacagatgtggacctccagcaataaaagcaggaattcaagtgccagatactcagcatattaggtttcctacgtaagtcacagggtaatatgttctaaatatctctaatgtgatccaaaaccctaaaaagagctggcacaaaaccatcgtgaatgactgcctctcttgatgtaaatttttaaaaatattattacagtatcatagtccccactaacaacaactggggtacatataacaatgtattgtgaaattaagtgtatttattctctttaccaatagcaaatgctaccctaccttagtaaaaccaagacttgcttcaatcaatgctgttttgtaaaaatagcaaagcaacgaatgctgaaatcaatcaaagctgcattacttgggttaaatcagtttctacttagaacacaggttaaaattttagtactaaaaggcctcaaaataattagtgacagaaatagtgttattaatttgctaagctcaacaataagcaa

SEQ ID NO: 247 - DNA, 526 bp, Homo sapiens
  Genbank Accession No. AA909181
  misc_feature (1)..(526): n = a or c or g or t
tttggttaagagtcgttcagtttattcatttgcttgtggcccaattcagtagttttactccctctcccacttggctcctcaggctttttgctcagccctggaaccgcgctgtaattggcagctccttctaaatcgggacccggatgctagctgtaactggagccgaagtctccttcttcacctcccgggacctggatgctagctgtaactgagggaccttccgcggcatctatgcgggcatggttactgcctctggtgccccccgcagccggcgcaggtaccgtgcgacatcgcgatggcccagctcctcagccaggtccacgggcagacggcccaggcatcgcgcacgtccagccgcgccccggcccggtgcagcaccaccagcgtgtccaggaagccctcccgggcagcgtcgtgcacgggtcgggtgagagtgggcgggtcggcgcagttgggctccgcgccgtggagcaagcagcagctccgccacttcggggctgcccatcatcatgacatntgcttccag

SEQ ID NO: 248 - DNA, 406 bp, Homo sapiens
  Genbank Accession No. AA909818
ttagaaaaatcagatttaatgaacacaatcaaaatactcattccttcgaggacaagacacagtgaagcaccaattatgaaattagaaaacaaaacagaattttttttagagtgtagcatagaaactttataaattgcaatttaaagtacttgggagaatagaatgaggagggggaatgtcctatctattgtaggcgtcagaaagaaggaagagaaaacgatgtctagcaatagcccaagaggtgagtagctgaacgttttatagagatgaggagagactaactaaggactagggcgcatccctttaaaattgaaatgtatgggctggacgtggtggctcacgcctgtaagcccagcactttgggaggctgaggcgggcggatcacctgaggtcgggagtttgagac

SEQ ID NO: 249 - DNA, 566 bp, Homo sapiens
  Genbank Accession No. AA909958
tttttgggtgagcactcaggggtttatctgaacttggaaatgctacagagccaagagtatggggtgggccttggcgcaggcgcatgcttccctctccttccacctgcaggctcttcctgagcttttctcctggcttctccaggatgtggtcgctctcggtgtccagacaaactcagggaggaaggctcagcgttcctcggggcagtgcagaaaatgtcctgtcactcccagaggccctgggtgctagccccctgctgcccagggctgcccatctgaccaacagctccaggctcccctctgccctcaaggtggcggccaccacgcccccattctccaggaaccagggccttgctgcgggtgccaggggaacccaggggctcagtgcacggctccagcttctgctccaagatgggcatggggggcctggtgttctcgtggaaggagtcgaactttgacacgtgtgtctgaatggcagactcacaggactggctcacaagctggtagagggtggcaagggactgcgggctcgccttctctcctcgttcaccttttggccctggcagtcc

SEQ ID NO: 250 - DNA, 379 bp, Homo sapiens
  Genbank Accession No. AA912409
cttagctcatcagctattgttaatgttagtgtattgtatgtgtggcacaagacaatttttcttcttccaatgtggcccagggaagacaaaaggttggacacctgtgtaatgactgaaatagtccaggtgaaatgactgtgttttggactggggaaccaaaagaagtggataaattccaaaaatatttagcagatatatccacaggacttggtgatgtagtgggtgaggaagagctggctgcctgaaatgaactcactaatgagcaaggtgtgcatcttgtctgaggacatttgcacattctttacattgttaagaccgctctgcagtatgaattcttccctgtaaagcattcaatctggctgaaggtttttcttctgta

SEQ ID NO: 251 - DNA, 376 bp, Homo sapiens
  Genbank Accession No. AA913079
ttgagaaaaacaaactgcttttaatttgacaaaactggatttcagcatttttcatcatccttattttgtaatttgccaaacccttgctgggaataaggacagcagaagataacaggtaagataggtaactcttttataaatgtttataaaatgcattgtaagctttgctacaatgcattttataaacattagtttgttaaccttgacaaacaccctttaaggcaatcattgttcccattttataaagtgagactctcaaaagttaggtggctgagaggtggcagaactggcatttcaacttggacttctctgactttaaagcctgtgtttttccttctacatttcacaaccactcagttcataccttgtaatccct

SEQ ID NO: 252 - DNA, 507 bp, Homo sapiens
  Genbank Accession No. AA913703
ctgaaaccatcaccataaagatccttccgaagtaaagaaatttggcattatggcctgattaaaatcccattaaatgtacacaggacaaggtctaattatttaaaaggaagccctcccttacctagttccctgtccacctctttatcctcatcattttccacattcttcagccacactgcagttactcaaaagcaccatagtatttcctttctggcttgcttactctactccttctgcctggggtaccattcccaatatgtggcttggtaaatttataagagaaacttttaaagatttaattcaaacatcattttgtttctgtttttttttttttttcctctggcttccaaaactggtcctctctggtagaactgatcactctagttatttggctatattaatcttccttcacaatgcttaaagattcttgggggcaggaaactgtcacacattcatctttgtcttctcagtagtgatgtgcgtaagtctgactttgacatatttgcc

SEQ ID NO: 253 - DNA, 467 bp, Homo sapiens
  Genbank Accession No. AA921809
ttttagattcagctgtaggaatttattcctgtttaaggataaaaagattgccaggatggttggagagaataaataaatatcttaaagtggttctaaaaggtgggagattctagaagaaccaatcccagagaagagacacaccaccacagggaatgtggtgatacctaccctgcacacacgcatgcacacacacacacacaatatacacagacacacacaccacatacacagacacacacacgacatacacatccatgctcacacatacaaacactattctgaacatcattgatcatctaaatcaaaaatcaacgatcaagctgctatcatttgcctatacttctcttgtgaataacagttgaattagtgacagacttagaaagaaatccttcctaataggcagttactaagaatggagtatagttggcaaagttgtgttggtcacttctccatgtcacatcacaggg

SEQ ID NO: 254 - DNA, 516 bp, Homo sapiens
  Genbank Accession No. AA921830
ttaaggtgtcaacattttaaaattactcaagatattaaccagaaaagatgattatggcctttaaaactattggacaaactgatgctatttaacattgttcacagccatttaatttgaataacaaattttagattctaagtaggccataacttctttgcaaaacaattgatttataaaggtacagtttcagaaggtaacagcatgagactagtcttcctataggcacattttagtagactgctcttctcatccctggtcaaggagcttctctaactgatggttgatatttcgcagatggctttcggctcccagaagtgttcttgctttaaataacagagctggaaggctggatgaatcatacgtttcctttacgtttggttcttgagcttgaacatctgaataatcttgataaagctgttttaaattagataagaaatatgctgcattcctaagggaagactttctctctttaagttcatcatattttgtttgtagttgtttcagctgtggctctaa

SEQ ID NO: 255 - DNA, 488 bp, Homo sapiens
  Genbank Accession No. AA921922
ttttaaaggagacagtaatattttaataggatagtgaaaaatatagcagattgacagtgacagcagaaaaagagcaggaatacagatattttcagaagattaaaatggtactgtgtaccctcaaaccaggcaagtttttctgagaggtctctaaacatatctcctgcatagagtagatgatttttcttggagctgtcataaatgctttatagttctctacattaattcatgtcgaatattttccatggttggtcagactcagacttaaaatagatctgagaaaggtcttcaggtttactttcagtaccattattcacttcatagccagctgggtgacaacatggtgtgtggccaattcaagtttacaaggtaaccttgcctgaattatcctggtccatcgaatacaaatagtaaagtgaaggtgagagaatagaattgcaaggaacgtgggagaagcagttgtcaaaaagcaagacaaacacaagaaa

SEQ ID NO: 256 - DNA, 536 bp, Homo sapiens
  Genbank Accession No. AA927475
ttttaatgcatttatttacaagtccttttattttgcatgttcattgtaaatttaatactgtaaatgtattcaattccattaaaatgccaatggtgccctttgattaaacttcttccaaaaattaaattctgcccagatgttgttgactttattatttcatgtcagattacttgaatatacgttgctgcataatcactaccaagtgggttctttgctgtgcatttgtatatcccagaatcggaggtttggggattctgaatgactagggtaccttgtaagtgaagctgctcacttccatgtgtcctctctttacttgccgttgagagaagggagtggtcaggcatctcccacgtgatttctggcttgggaactcccaaggccacacagtggagctgaaaggctgcccctgtcctggtgacaatactcctgggtggacgatttgtaattcggggagggtaggctacaatcattactggagacgtaatcagtgtatgaccaacactattttgagccttacagatatagtttcctctgtc

SEQ ID NO: 257 - DNA, 594 bp, Homo sapiens
  Genbank Accession No. AA928698
  misc_feature (1)..(594): n = a or c or g or t
gttatatagatatatatttaatataatatgtgtgattgtggttacagatacatatttggtgctttatttatccagaagcatgagtcacatagtacataaagtattgaatacaaaattctaaagataaacacaatttttcttgaatttaaaatatatgggataaatgcttacaaatggatttataaacctttcacttctacttcattctcctggctgtgtcttccgaagatgagttgctagttgcaacattaaaaaaaaatagctcgttcaaatcctgacactatatgacataaaaagaacttttggcaaatatttattcagattgcttgtctccagtggcaaatttctcagcatttctctttgttttgtctatgccttagcctgtgcatttttctagaaaggaagttaaatgcttntaatgtattaattattacattattgaagttggacccaaatatgttaaatatttcctcttgcaaagggagaagaggaagggaggaacaggggcaaggtggggaggaaaaaaatacctcaggtgagagaacaagtaacttgcaagaggcttattaaactgtatataaatgttgaagaggc

SEQ ID NO: 258 - DNA, 503 bp, Homo sapiens
  Genbank Accession No. AA928776
tttcctgggtcaactcttttaatttatatggaaagcgaagaacaacattaatggagatgcacaatgattatgcaaacaagctatatatatgtacaaaggcaaacagacacataacagtctctgcagactgattgtatatagtaagaaaagatcaaaagactttaaaacctaaatgacttttgacatacaaactcttcttgagaatgtttgttgtaaatggtttcaaaaatacaaattatagccaatcaaaacattgctttggttggtgcatttaagtatccaactcaaaaagcatatcaaatattttgggtactaggcagtttccaaagtagcatggtagtattacttgttaaaagggttctgttttcattaacagtactaagtggaagggatctgcagattccaaactggaataagctctatcatattctgaaacaagaattagaatgacttgagaacgggcaaataacaaagcaaaccaatataattatatggtcattctg

SEQ ID NO: 259 - DNA, 275 bp, Homo sapiens
  Genbank Accession No. AA928876
tttttttttttttttttgagacagagactcacactgtcgcccgggctggagtacaatgttgccatctcgcttcactgcaacccctgcctgctgggttcaagccattctcctgccgcagcctcccgtgtagcttcttaagatgtgaagatttttaaattaagatgactcttgggatgaaccatcttgtgttggttaaagacttttactgacatatttttaataatttttaacttttattttcaggtcaatggcacatgcgtaggtttgttatgtag

SEQ ID NO: 260 - DNA, 505 bp, Homo sapiens
  Genbank Accession No. AA936632
  misc_feature (1)..(505): n = a or c or g or t
ttctttttgctcggctcaaagtctgcagaaggcacgctggcggcctcaagcggggctgcatcctgcttccttctcttgctgggtatggcattagcagcttcccattcatcggatatgaggtctacagcagcatctaccaaaacctctgatgtagctccttcttggacggtccaggaggctttggaacagggctcctcggggttttcttgccaactgtctgagcccgggaacaagcacgggcccccttcctccttcagctcctgcccacactccatttcaccctccgaggccgacgccattgtggagttattgttctcagaatctgctatgggggctgcaggaggcactnnctctccgcactggctgcagaacttgggggtttctccttggagacatgctggcacgaaggacactccatgggtcctgctgggactgccctgcagatccagaagcaagagcaggagtcgctggcagcctgctatatactacatgtcctgtcacgtga

SEQ ID NO: 261 - DNA, 695 bp, Homo sapiens
  Genbank Accession No. AA947123
  misc_feature (1)..(695): n = a or c or g or t
ttttttttttgaccacatattactctttaattagatttgttttacaatatgttcttgtcaacgagctatgtcaaactgtttgtttaaacctgacagaaaagcattttcacaaaaacgtaccatggttctgtttggggaggggaagaagcactttttctagagatggaaaatagttccagtaaaaagttcttattcctttcttctaaggagctcgttctgaatattttcacttagttctactgttctttaaacaggactttaaaaagaattttgtatttacaaaatttacattttgttcctacaaaatgtaattttttaattttgtaaaataaaaatgtaaaattttaattttgttcctacatgagaagtgtgcgtactttcaattagttttcattaatatcttacgagatttcctcttaggtggttggatctgggtaggcagagttagctggtgcaacactatttaggagtcgtgnctcgtggctgacaaanacatgtagtgctcagtgagtgagttatgtagtacatgtgaatcagatgatgcctagagtattgaaattgggaacagcccagatatgaaatttgtatgtcactgtaagaggaacaccataatgatgtaatgtgaatggtcacagtcaaaaaccacacacnagcctatcagctgcactgtcatgccatcttatctggcatgaata

SEQ ID NO: 262 - DNA, 440 bp, Homo sapiens
  Genbank Accession No. AA948319
ttttgaaagtttgaaaaaataattataaagtttatttaaatgttgattgtcccaaggtctacagtttcttttctgttgtgtcatcagtgacaaagagtaaaaaaaggaaactcccatatttagcactttagagtaaaacacatggatcatcgttattaacagtcctctgggcgtgctggagctcactgagaaggcttctattttgagcttggaatgttgtgctgagctgtgcagcctgttcctaaagagtgataaatagaaagtaagatcaagcttcttactgattgcctaaatcactcacttgtccttacttcttttcatctacagtagcaataaacagttcctgaatatctctcttccattcacgtgcatctaacctatttctgtaattattcaccctccttgtctttctctagctccagaaatggtcatttctcatc

SEQ ID NO: 263 - DNA, 524 bp, Homo sapiens
  Genbank Accession No. AA968657
ggcttttaataagtgcctgattgctaaatggtaatatttttgttatttgctgaggccattttcattatggggacagatgtacagatgttcacccatgctgcagttggcagaggacgcagagcacaagtagggtcgctgcagaccagcattccttagcactctccaaactggtcccagcactctttggggctgcctcccctaaacaggaaagcaagatcctgaggaccccaacccccatgcacaggcttgaatgagctgcaggtgggacaaaggaactctcctactcaggtgcttctgggcttctgcagccaggccaggccttcctcacaatcaaggcccaggtgggaaactggaggcccagccagacccacacctcacttcagcccgagcagcagcaacctcctccctgctgggccagcagtggcacccagggcttcagtataggcaatcctaccatcttatcacatcgtatcacagggcagtgtggggtacaggggaacagagatggggttgttgcaggctgt

SEQ ID NO: 264 - DNA, 463 bp, Homo sapiens
  Genbank Accession No. AA969863
tttttaaaattttggggaattaatggatttgccttttaaaagggaccgccggccaaaaattccctggtaaaattttgaacagttgggaaaatccggtcacctttcctgaacccctcctaaaatatttccgggccggaccaaaacttcctagatggcgtcctttgatgtggaaattgactgcttcccactttttctacaccccgggggtgtaattaacaatattccatcacctctcttctttcccgcctatataaaaattaaaataccccttaaaaaactaatatatcttctctttatttcttacagatatgagttcaatgtttcactccacagtgctgtggtttaagagaattttttcatttacaagttaaacaacaatccgccccaagggaactgatagtctataggctcatagtgcaaataaacagtttaggaatgcagcgactgacatttctaaagtaca

SEQ ID NO: 265 - DNA, 485 bp, Homo sapiens
  Genbank Accession No. AA975530
agtaaatttgccataggtgcctatggatactgtttagatctgctggtgacatttaaagaaagagcctttgagaaacatgcatacttttctcttttctcctatattcaatactcatatagcctaaaagatggaaactggttcaagaatttaaatgacttgttccctaaaaagttaatctcctcacctttgtgaaatatatcaagtgctttctataaataagggcaggaaatgctaacttcataagcatagtcctagtcattaaaataatttgatcatcttctaaaatttaagtatgatagtaacacagtaatatggaaaatctcaatatacttaacacttcctaaacagcacaatgaaatgttgttcaaggtctgaattaatttgctacaggacctaagcaagtctgtttgcttatcttttggctttaaaattctttaagtctaaaatggtgataattttagaataaactgacaatgtggggaaca

SEQ ID NO: 266 - DNA, 449 bp, Homo sapiens
  Genbank Accession No. AA976064
tttttttttttttttttttttttcaccactcagctaatttttgtattttcagtagagatgaggtttcaccatcaggtgatccacccgcctcggcctcccagtgttaggattacaggcgtgacgactgcacccggcccaccttaactttacataagacaagagtcccaaacatacaaactgatcacgaagttaacatatacacctcagacaggaaactggtagccaacagcctgcaagtcatctactagatgtttagatgtttccaaacaagcaaggtgtcatcgtgtatcaagtgtggctgtgagtgcagcagcagaggtagcagcatcacctatttccacgccagtaacagctccctgggtgcctcaataccggcacccggcagaggcatgtagacaaaacagaatctgactcggtccctgaagctgcttctctggggttgtcatggc

SEQ ID NO: 267 - DNA, 506 bp, Homo sapiens
  Genbank Accession No. AA977204
tttgttatttaaggatttgtttaatgttttaaaattcaaagcactttaaattattttaagacaaaagattaataaaaacaacattacctttcaaatacaactttataacagcacagtggaagaatggtaaacagtccctcttttttttaaaaaaaaatcagtacttaaaaccaaaggaaggcttatatgtacagctaattcagaaagggaacaatgacacctaaagacatagataaatgcttcattttaatccaataaatgtcctacctactggatcttaataatgatgttttcaatatgccatttaaaataaactatccttgaaaataaagttttaaatcattcaatataatctatgaaatagcatctagttaactagattaccttaaatataccaaatattataatcagcaaaataaaaaccagtaaatcaatttgtatctgaaagcctgatgttctgatctactggattttaattttttttccctaagattaacaatataaac

SEQ ID NO: 268 - DNA, 498 bp, Homo sapiens
  Genbank Accession No. AA993566
ttttaatgtccaagaccaagtgatgattttcctgtataggttctagaagcctaatttgtgtgtgcaactcaaacattcgacaaacataagataccaatctgctcagcacttactatgaattcaatgtgattgtgcataccaccttactttccaaatcaaggtatacagcagtggggataagtgatgttaattttaaaaatttaaatatttttatactaaaataaacattatggagtagcagatgcaaaatctgcatgaattcttaagataaaaatgaagactgcaaagaatcatagatttctcaaagggtcacattgaactatgccttcaggactcctggagtacaagcacatttgcccaaattgttctgtcattatgggtacactttatgggtacattatgggcagaagataactaaaaagtgtttttctctactgcaatgatccctcatgtagtatatttttttcctactactgtttataatactttacccaattt

SEQ ID NO: 269 - DNA, 6651 bp, Homo sapiens
  Genbank Accession No. AB002351
ggccgagtcgtggcgggagacggtgcagctgtacgaggacgaggtgcgcgagctggaggaggcgctgcggcgcggccaggagagcagactccaggcggaggaagagacgcggctgtgcgcgcaggaggcagaggcgctgcggcgcgaggcgctcgggttggagcagctgcgcgcgcggctggaggacgcgctgctgcggatgcgcgaggagtacgggatacaggccgaggagcggcagagagcgattgactgcctggaggatgagaaggcaaccctcaccttggccatggctgactggctgcgggactatcaggacctcctgcaggtgaagaccggcctcagtctggaggtggcgacctaccgggccttattggaaggagaaagtaatccagagatagtgatctgggctgagcacgttgaaaacatgccgtcagaattcagaaacaaatcctatcactataccgactcactactacagagggaaaatgaatggaatctattttcaaggcagaaagcacctttggcaagtttcaatcacagctcggcactgtattctaacctgtcagggcaccgtggatctcagacgggcacatctattggaggtgatgccagaagaggcttcttgggctcgggatattcttcctcggccactacccagcaggaaaactcatacggaaaagccgtcagcagtcaaaccaacgtcagaactttctctccaacctatggccttttaagaaatactgaggctcaagtgaaaacattccctgacagaccaaaagccggagatacaagggaggtccccgtttacataagtgaagattccacaattgcccgcgagtcgtaccgggatcgccgagacaaggtggcagcaggtgcttcggaaagcacacggtcaaatgagaggaccgtcattctgggaaagaaaacagaagtgaaagccacgagggagcaagaaagaaacagaccagaaaccatccgaacaaagccagaagagaaaatgttcgattctaaagagaaggcttctgaggagagaaacctaagatgggaagaattgacaaagttagataaggaagcgagacagagagaaagccagcagatgaaggagaaggctaaggagaaggactcaccgaaggagaagagtgtgcgagagagagaggtgccgattagtctagaagtatcccaggacagaagagcagaggtgtccccgaaaggtttgcagacgcctgtgaaggatgctggtggtgggaccggtagagaggcagaagcaagagagctacggttcaggttgggcaccagtgatgccactggttctctgcaaggcgattccatgacagaaaccgtagcagaaaacatcgttaccagtatcctgaagcagttcactcagtctccagagacagaagcatctgctgattcttttccagacacaaaagtcacttacgtggacaggaaagagcttcctggggaaaggaaaacaaagactgaaatagttgtggagtctaaactgactgaggatgttgatgtttccgatgaagctggcctggactaccttttaagcaaggatattaaggaagtggggctgaaaggcaagtcagccgagcagatgataggagacatcatcaacctcggcctgaaagggagggaggggagagcaaaggtcgtcaacgtggagatcgtggaggagcccgtgagttatgtcagcggggagaagccggaggagttttccgtcccattcaaagtggaggaggtcgaagatgtgtcgccaggcccctgggggttggttaaggaggaggaaggttatggagaaagcgatgtcacattctcagttaatcagcatcgaaggaccaagcagccccaggagaacacgactcacgtggaagaagtgacagaggcaggtgattcagagggcgagcagagttattttgtgtccactccagatgaacaccccggggggcacgacagagatgacggctcggtgtacgggcagatccacatcgaggaggaatccaccatcaggtactcttggcaggatgaaatcgtgcaggggactcgaaggaggacacagaaggacggtgcagtgggcgagaaggttgtgaagcccttggatgtcccagcgccctctctggagggggacctgggttccactcactggaaagaacaagctagaagcggtgaatttcatgccgaacccacagtcattgaaaaagaaattaaaataccccacgaattccacacctccatgaagggcatctcctccaaggagccccggcagcagctggtggaggtcatcgggcagctggaggaaacccttcccgagcgcatgagggaggagctgtccgccctcaccagagaggggcagggtgggccggggagcgtttccgtggatgtcaagaaggtccagggtgctggtggcagttccgtgaccctggttgctgaagtcaacgtctcacaaactgtggatgccgatcggttagacctggaggagctgagcaaagatgaggccagtgagatggagaaggctgtggagtcggtggttcgggagagcctgagcaggcaacgcagcccagcgcctggcagcccagatgaggaaggtggagcggaggccccggctgctggcattcgcttcaggcgttgggccacccgggagctgtacatcccttcaggcgagagcgaggttgctggtggggcctctcacagctcgggacagcgcactccccagggcccagtgtcggccactgtggaggtcagcagccccacaggctttgcccagtcacaggtgctggaggatgtgagccaggctgcaaggcacataaaactcggcccctctgaagtctggaggactgagcgaatgtcatatgaaggacccactgcagaagtggtggaggtaagtgcgggaggtgacctaagtcaggcagcgagcccgaccggagccagccggtctgtgaggcatgtcacgctgggtcccggtcaaagtccactgtccagagaagtcatcttcctaggccctgcccctgcctgtccagaggcatggggctcgccagaacctggcccagcagagtcttctgcagatatggacggatcagggaggcacagcacatttggctgcagacaatttcatgctgaaaaggagattatttttcagggccccatttctgctgcagggaaggttggtgattattttgcaacagaagagtcagtgggtacccagacttctgtcaggcaactccagttaggccctaaagaagggttcagtgggcaaatccagttcacagctccactttcagacaaggtggagttgggtgtcataggagattctgtacacatggaagggttgccagggagcagcacatccatcaggcacatcagcattgggcctcagaggcatcagaccacccagcagatagtttaccatgggctggttccccaactgggggaatctggtgactcagagagcactgtgcacggagagggctcagcagatgtgcaccaggccactcacagtcatacctcgggtagacaaaccgttatgactgaaaagagcaccttccaaagtgtcgtttctgaatctccccaggaggatagtgcaggggacacatcaggggcagaaatgacatcgggtgttagcagatcctttaggcacattcgactaggtcctacagaaacggaaacctctgaacacattgccatccgtggacccgtgtccagaacatttgtgcttgctggttcagcggactcccctgagctaggcaagttagcagacagcagcagaacgctaaggcacattgcaccagggcccaaagaaacttcgtttacctttcagatggatgtgagtaacgtagaggcgatccgcagccggacacaggaagcgggagctctcggtgtgtctgaccgtggttcctggagagacgcggacagtaggaatgaccaggcagttggtgtgagctttaaggcctctgctggggaaggagaccaggcccacagagaacagggcaaggagcaggccatgtttgataagaaggtgcagctccagagaatggtagaccaaaggtcggtgatttcagatgaaaagaaagttgccctcctctatctagacaatgaggaggaggagaatgatgggcattggttttaataagcagaaacattttgttttaatggcagcctgttggcgacgtgccaacatccaaaggccttaacttattttaagaggccgagggagtctatgaaaatctccccttttttacttttttaaagagtactcccggcatggtcaatttcctttatagttaatccgtaaaggtttccagttaattcatgccttaaaaggcactgcaattttatttttgagttgggacttttacaaaacacttttttccctggagtcttctctccacttctggagatgaatttctatgttttgcacctggtcacagacatggcttgcatctgtttgaaactacaattaattatagatgtcaaaacattaaccagattaaagtaatatatttaagagtaaattttgcttgcatgtgctaatatgaaataacagactaacattttaggggaaaaataaatacaatttagactctaaaaagtcttttcaaaaagaaatgggaaataggcagactgtttatgttaaaaaaattcttgctaaatgatttcatctttaggaaaaaattacttgccatatagagctaaattcatcttaagacttgaatgaattgctttctatgtacagaactttaaacaatatagtatttatggcgaggacagctgtagtctgttgtgatatttcacattctatttgcacaggttccctggcactggtagggtagatgattattgggaatcgcttacagtaccatttcattttttggcactaggtcattaagtagcacacagtctgaatgcccttttctggagtggccagttcctatcagactgtgcagacttgcgcttctctgcaccttatcccttagcacccaaacatttaatttcactggtgggaggtagaccttgaagacaatgaagagaatgccgatactcagactgcagctggaccggcaagctggctgtgtacaggaaaattggaagcacacagtggactgtgcctcttaaagatgcctttcccaaccctccattcatgggatgcaggtctttctgagctcaagggtgaaagatgaatacaataacaaccatgaacccacctcacggaagctttttttgcactttgaacagaagtcattgcagttggggtgttttgtccagggaaacagtttattaaatagaaggatgttttggggaaggaactggatatctctcctgcagcccagcaccgagatacccaggacgggcctggggggcgagaaaggcccccatgctcatgggccgcggagtgtggacctgtagataggcaccaccgagtttaagatactgggatgagcatgcttcattggattcattttattttacacgtcagtattgttttaaagtttctgtctgtaaagtgtagcatcatatataaaaagagtttcgctagcagcgcattttttttagttcaggctagcttctttcacataatgctgtctcagctgtatttccagtaacacagcatcatcacactgactgtggcgcactggggaataacagtctgagctagcaccaccctcagccaggctacaacgacagcactggagggtcttccctctcagattcacctggaggccctcagacccccagggtgcacgtctccccaggtcctgggagtggctaccgcaggtagtttctggagagcacgttttcttcattgataagtggaggagaaatgcagcacagctttcaagatactattttaaaaacaccatgaatcagatagggaaagaaagttgattggaatggcaagtttaaacctttgttgtccatctgccaaatgaactagtgattgtcagactggtatggaggtgactgctttgtaaggttttgtcgtttctaatacagacagagatgtgctgattttgttttagctgtaacaggtaatggtttttggatagatgattgactggtgagaatttggtcaaggtgacagcctcctgtctgatgacaggacagactggtggtgaggagtctaagtgggctcagtttgatgtcagtgtctgggctcatgacttgtaaatggaagctgatgtgaacaggtaattaatattatgacccacttctatttactttgggaaatatcttggatcttaattatcatctgcaagtttcaagaagtattctgccaaaagtatttacaagtatggactcatgagctattgttggttgctaaatgtgaatcacgcgggagtgagtgtgcccttcacactgtgacattgtgacattgtgacaagctccatgtcctttaaaatcagtcactctgcacacaagagaaatcaacttcgtggttggatggggccggaacacaaccagtctttttgtatttattgttactgagacaaaacagtactcactgagtgtttttcagtttcctactggtggttttgatattgtttgtttaagatgtatatttagaatgacatcatctaagaagctgattttgctaaactcctgttccctacaatgggaaatgtcacaagaatgtgcaaaaataaaaatctgagg

SEQ ID NO: 270 - DNA, 852 bp, Homo sapiens
  Genbank Accession No. AB002409
cttgcagctgcccacctcaccctcagctctggcctcttactcaccctctaccacagacatggctcagtcactggctctgagcctccttatcctggttctggcctttggcatccccaggacccaaggcagtgatggaggggctcaggactgttgcctcaagtacagccaaaggaagattcccgccaaggttgtccgcagctaccggaagcaggaaccaagcttaggctgctccatcccagctatcctgttcttgccccgcaagcgctctcaggcagagctatgtgcagacccaaaggagctctgggtgcagcagctgatgcagcatctggacaagacaccatccccacagaaaccagcccagggctgcaggaaggacaggggggcctccaagactggcaagaaaggaaagggctccaaaggctgcaagaggactgagcggtcacagacccctaaagggccatagcccagtgagcagcctggagccctggagaccccaccagcctcaccaacgcttgaagcctgaacccaagatgcaagaaggaggctatgctcaggggccctggagcagccaccccatgctggccttgccacactctttctcctgctttaaccaccccatctgcattcccagctctaccctgcatggctgagctgcccacagcaggccaggtccagagagaccgaggagggagagtctcccagggagcatgagaggaggcagcaggactgtccccttgaaggagaatcatcaggaccctggacctgatacggctccccagtacaccccacctcttccttgtaaatatgatttatacctaactgaataaaaagctgttctgtcttcccacccgc

SEQ ID NO: 271 - DNA, 2904 bp, Homo sapiens
  Genbank Accession No. AB005293
ggcacgagctctgtgagactgaggtggcggtcagccggagtgagtgttggggtcctggggcacctgccttacatggcttgtttatgaacattaaagggaagaagttgaagcttgaggagcgaggatggcagtcaacaaaggcctcaccttgctggatggagacctccctgagcaggagaatgtgctgcagcgggtcctgcagctgccggtggtgagtggcacctgcgaatgcttccagaagacctacaccagcactaaggaagcccaccccctggtggcctctgtgtgcaatgcctatgagaagggcgtgcagagcgccagtagcttggctgcctggagcatggagccggtggtccgcaggctgtccacccagttcacagctgccaatgagctggcctgccgaggcttggaccacctggaggaaaagatccccgccctccagtacccccctgaaaagattgcttctgagctgaaggacaccatctccacccgcctccgcagtgccagaaacagcatcagcgttcccatcgcgagcacttcagacaaggtcctgggggccgctttggccgggtgcgagcttgcctggggggtggccagagacactgcggaatttgctgccaacactcgagctggccgactggcttctggaggggccgacttggccttgggcagcattgagaaggtggtggagtacctcctccctgcagacaaggaagagtcagcccctgctcctggacaccagcaagcccagaagtctcccaaggccaagccaagcctcttgagcagggttggggctctgaccaacaccctctctcgatacaccgtgcagaccatggcccgggccctggagcagggccacaccgtggccatgtggatcccaggcgtggtgcccctgagcagcctggcccagtggggtgcctcagtggccatgcaggcggtgtcccggcggaggagcgaagtgcgggtaccctggctgcacagcctcgcagccgcccaggaggaggatcatgaggaccagacagacacggagggagaggacacggaggaggaggaagaattggagactgaggagaacaagttcagtgaggtagcagccctgccaggccctcgaggcctcctgggtggtgtggcacataccctgcagaagaccctccagaccaccatctcggctgtgacatgggcacctgcagctgtgctgggcatggcagggagggtgctgcacctcacaccagcccccgctgtctcctcaaccaaggggagggccatgtccctatcagatgccctgaagggcgttactgacaacgtggtggacacagtggtgcattacgtgccgctccccaggctgtcgctgatggagcccgagagcgaattccgggacatcgacaacccaccagccgaggtcgagcgccgggaggcggagcgcagagcgtctggggcgccgtccgccggcccggagcccgccccgcgtctcgcacagccccgccgcagcctgcgcagcgcgcagagccccggcgcgccccccggcccgggcctggaggacgaagtcgccacgcccgcagcgccgcgcccgggcttcccggccgtgccccgcgagaagccaaagcgcagggtcagcgacagcttcttccggcccagcgtcatggagcccatcgtgggccgcacgcattacagccagctgcgcaagaagagctgagtcgccgcaccagccgccgcgccccgggccggcgggtttctctaacaaataaacagaacccgcactgcccaggcgagcgttgccactttcaaagtggtcccctggggagctcagcctcatcctgatgatgctgccaaggcgcactttttatttttattttatttttattttttttttagcatccttttggggcttcactctcagagccagtttttaagggacaccagagccgcagcctgctctgattctatggcttggttgttactataagagtaattgcctaacttgatttttcatctctttaaccaaacttgtggccaaaagatatttgaccgtttccaaaattcagattctgcctctgcggataaatatttgccacgaatgagtaactcctgtcaccactctgaaggtccagacagaaggttttgacacattcttagcactgaactcctctgtgatctaggatgatctgttccccctctgatgaacatcctctgatgatcaaggctcccagcaggctactttgaagggaacaatcagatgcaaaagctcttgggtgtttatttaaaatactagtgtcactttctgagtacccgccgcttcacaggctgagtccaggcctgtgtgctttgtagagccagctgcttgctcacagccacatttccatttgcatcattactgccttcacctgcatagtcactcttttgatgctggggaaccaaaatggtgatgatatatagactttatgtatagccacagttcatccccaaccctagtcttcgaaatgttaatatttgataaatctagaaaatgcattcatacaattacagaattcaaatattgcaaaaggatgtgtgtctttctccccgagctcccctgttccccttcattgaaaaccaccacggtgccatctcttgtgtatgcagggctatgcacctgcaggcacgtgtgtatgcactccccgcttgtgtttacacaagctgtggggtgttacgcatgcctgcttttttcacttaataatacagcttggagagatttttgtatcacattataaatcccactcgctctttttgatggccacataataactactgcataatatggatacgccttatttgatttaactagttccctaatgatggacttttaagttgtttcctttttttttcttttttgctactgcaaacgatgctataataaatgtccttatc

SEQ ID NO: 272 - DNA, 5770 bp, Homo sapiens
  Genbank Accession No. AB007972
gtgagcccgggaggcggacttgcagtgagccttgatcacgccactgcactccagcctgggtgacagagcaagactccatctcaaaaaaaataataataataaataaataaaaaatcccaattacagaacaggagatatgtttcctctgacaaaaccccatttttagagtatataaaattctgtctttcatttccaaccatttttcaagagaagctgctactatcttgagacttcgtattatcatgggagtactgtaagttcagtctcagggaatgctaaattagagtaataagttttatatccttcattctgggagaggaaatcaacataaggtgttgactaattgattatcctggaacattttgaatatcggggaaggaagatgatacttctttctcaagaaaagaaaattggattattaggaatacatcttgacccttttccactcaatagaccagggaaaggggttacagagagcctcctcagatctgtttgtgcctttcaaaagtactgggggcagattctcaaaactcttagattggtgttgcatccctgccacttcacatgacccttccatgttaaagctgacttttcttgccagaaagttttccttgtgacaagaaatttgcaagcttttcaatctcaggaatactggattctatagccaagaactcatgaaagtaagtgtaaactatcctaggtaatttcaggtactttctcttatgcaattaattttattaactgatttctggtctatctccagagataaaataccattccttcacaactgtattgtctggaagccccatgagatggtaattataggccttctactagccagcagttctctctggatactggcatcagcaggtctcctttttcttgtgctgcttggacaggtacctaccgctggcctcttcagtggccacaatcctcagtcctcacctgctggtttggagactcatgagcaccccaggcagctcaagctgaataaatagctgcagacatggccaacaacatggggctcaggtctgtcacttaacttagagtctttacatgaaatatcagaatgggaaagagaatgttcctggtaaaactctgttttcattaatttgttatttttcaaaaaccgagccacacctttggaagtaatgatttggccattccagagattctggggctaaagtttgtttttccagggctgctgatccttttccagatagctccagagtatgatgaccccagccccatcccaatctctagcgaaagggttatgcaaatctcagggtgttgcctctaaagaatctaaagaatagacatgctttgggcttactcagtgtaccagattctctagtgggccattctcatttgatgttccctagaacctccctgtcttccaactgcaggatgtgtttacttctcttctgggcttcccctggtttctgtcctagttcccaccccaagtttaagaagacttagattcatttattgctatctgaggccactagtgagatttcagatctctcttttgcaacattttacccatttcccttccccaaaccatgtgcttattagatggttccactcaggaagcaaggaagctaaaactcaagttaatggtctgtggatcccacgaaagtgtgtgtaaactactgactgtttctccactagaggcatttaattgagccaaagatgatggaagaagaaactctcaaagccatgtactttgttaggtgtctggatttttggcctgtttgcagcctctcctagccacagacagacactgtctcctctcagagaaaggccagtgtttcggtccaggccactggtgagtgtcggcacccttgaggtgggcatggagtgagcagaagaagcctggagaagagagaactatttaaaagtgttgccagttattcagcttccaggcggctttgcacctccaaaggtgcaaaaaggaaaaagaaagcagaaaggattcagcatttaagcagaaagaaaagggaaattctactctaccagatgagccactggttccactggagcttatcagtgaagtaacactgcaggagccctggtatccttccctcagagatatcatcaggggccctcaaaccccattgtttatgccagcactgaccgcactttaagcacacacttaccaatcagaggtcgtgtaattggcctaaatctaggcccagttattactacaaatcttagtcaccatactctctcgcccaggctggagtgcagtggtgtgatctcggctcgctgcaacctccgcctcccgggctcaggggatcctctcgcctcagctcccgagcggctgggactgcaggtgtgcgccgccgtgcccggctaatttttgaatttttttgtggggatggggttttgccgtgttgcccgggctggtctggagctgctgggctcaagcaatccacctggctgggcctcccaaagcgatgggattgcaggcgtaagggcccacgcccagcctaccatactgattttcaaggcagggtctaacccttcataagatgtgagttcttccaacccaataagcaggcagctttgaggacaaaaaggcaacattaaaagataagaccctagaagtcagaacatctgtattccaaggccaccccttctccttttagtcatgtgactttgggcaggtcaccctccctgtctgtaaaatgaggttggactggataatctttatgtgccctttccttttggcttaaaattctgtgatttattcattcttaggaagatcagcatatttattgggatttctgcttcaaaaattctttctaacctcaaaaatccaagtccagaattttttgttttcttctggatttaaactgtttaatatgagcacatcaaggttgacttctcatcctttttgggaagtgaatttaatattgagggtaattgaatgatgttgcaatggctttccctcctgctggcttggtaagaatattaaagcctgcagaggtggaaattggagctcatggagaaatggatagaaagcaatttgttgcaggcagcctttggacaagttgttttaataggaaatagacctgctgcttcataggtttcctcaaccacctttcctcagctttcttaaaatgggatctacattggctcttcacacccaaatagcagactaatcgtttttctgcttagcaccgtctggttcattgtcttgaactctgccttacagcagcaagaaaattttcctcgacaagaacctcaatctttagttccattgagctccccctctggattttggacttaccagaagtaggaggttctgataccattcaagatggtctttccttcaaagcaggtctgaagaggagactaccaaagcagtgtttacaaacccagagtccacacaaccatattgcatagaacagcacttggctttcacaagcctcctacaggacctggtgtaattggagtgaaagggcagagaccctggaagtggaggtggctgtgtgctgcgatgggaagaaggcagaaggcccaggggctttggacatagagcagggtggaagctgcaagtactgggaaggaagagagtttcacagaaacaaagctttgtcacacagaaatgagttctgtctcactggtgacttcatccctcaggctccagctgagcagagattttaatcagcttccttaatgggtattgacactgctcaggaagcagtagaccctgtcagggacagctattgatcttttgtgttctgattagattggaaaatagatcaacttcattgtagtccaggaactgttggtcacagctactaggaatgaggtgatttctgagggctgagaaaaaacacagaatcttggccagcagccagcagctgcatggtgaaagatgcattcacttctcctttgagagttggggttgagggcaaacatagaacccaggtttggcttacaacccagtgtcccggaagccctccttcgggagaactgtaagtaagaggtgggtgtgtctaaagacaataccattaatgaatgttctggccttacctaaaaaggtttagcaatttggggataactcttggatctagcttatgtgcgttcacatgcacatttgctagcccagagcttttaaaatgaggtctggcatatacttgattacaaatgaaaactcagaaaccaattttatttattaaatcatatcttttgtttttccccctcccttctaatcccccaaaggacctatttgagctgttccccaattcatctgcttattttggaccatgaatctgccagagtgatattttctgttatttctcctccaaatttttccctgatgtttccaataaagatttacttgggtggccccttaaggtgacatcaggatgctcttatgtccttccagaataagcatacacttcactcctctccctttcatctccctctgcattcttaattccttgcttttctcacttggagccgagggtgctttagagaggtggttttccatgaatcagccaagattcctgtagaagttgggtataccaaccaccaccaccaccgccccctattccagtttcaaagctcctcggctatgctaatgtcccctcagagatgaggtttgacttttaggcccgtatgactcctccatagcctggccaaggagaccatgagtagccatgtctggtttactctttatcctgagactgtttgtttatagcttaaaacagaagtgtgtcttcccagcacaaacctaatcaatcagtgtatcagtgcatctggtggcaacagctcagcccattcaaagagcaaggattcaggaaaggcacactgatggtggggagcctcttaagagcctctaatgttctcccaaaaccagagttgagagtcggagtgccagtcgtcggggcccactattcctgaataagggacatgcaagggccagaagtagcttgactctcgcctaaatatctgtgcctttgcctgtcctttctcccactctactgaaacccggaacagattcccgcttgccttctgatgaagagaggttaggtaaagagagtttggaggaaaaaagacaccaggaggcaggctgtggggtaggagagggttctgagaggaggcagcaatccagaatacctccttttctagccagcatcccttgaacttttgaaaggttgtgcctaccactggctggcacaccagggcaatgatttccctgcagaaggaaggaaagaatgtttcacccttgcatccttcttggagaagctacagcctgtgctcagttgagtggttcacactcagactttggctttatggttttccttcctccttgtctttgccctgaccttgatcaacaggggtgaaaagaaccaccctgaggtttccatgcctctcccattttagtggtagcattttgtgtctttactccacccttcaccctagttccaccaaggttcacacaccagatgtaactgtttttcagctgagttgtatggattaacttcagtccactgtaaatacacctgggatggggtggggttggggttgtttagggagaagcagccagacttgctttgtgaactgaatgtatttttatgcaattttgagtggcctttcaaccctaagatgaatggttttgttttactggttgttgttatatagttttgagtattctgtgtttgaaagtttgggaataataatattcacttctatatgatgcctgtaaacacaacagtatttataaatgagtaaataaaactgtgttttaactttg

SEQ ID NO: 273 - DNA, 6740 bp, Homo sapiens
  Genbank Accession No. AB011089
cccagttgtctgcgggctgcggggagctaagtccccagattggaggaggctggctctggtcttcgatgcacaggagtggccgttatggaacgcagcagcagcgtgcagggtcaaagacagccggccccccatgtcagtggtctaggatggccagtgaaggcaccaacatcccaagtcctgtggtgcgccagattgacaagcagtttctgatttgcagtatatgcctggaacggtacaagaatcccaaggttctcccctgtctgcacactttctgcgagaggtgcctgcagaactacattcctgcccacagtttaaccctctcctgcccagtgtgccgccagacctccatcctgcccgagaaaggggtggccgcgctccagaacaatttcttcatcacaaacctgatggacgtgctgcagcgaactccaggcagcaacgctgaggagtcttccatcctggagacagtcactgctgtggctgcgggaaagcctctctcttgcccaaaccacgatgggaatgtgatggaattttactgccagtcctgtgagactgccatgtgtcgggagtgcacggagggggagcacgcagagcaccccacagttccactcaaggatgtggtggaacagcacaaggcctcgctccaggtccagctggatgctgtcaacaaaaggctcccagaaatagattctgctcttcagttcatctctgaaatcattcatcagttaaccaaccaaaaggccagcatcgtggatgacattcattccacctttgatgagctccagaagactttaaatgtgcgcaagagtgtgctgcttatggaattggaggtcaactatggcctcaaacacaaagtcctccagtcgcagctggatactctgctccaggggcaggagagcattaagagctgcagcaacttcacagcgcaggccctcaaccatggcacggagaccgaggtcctactggtgaagaagcagatgagcgagaagctgaacgagctggccgaccaggacttccccttgcacccgcgggagaacgaccagctggatttcatcgtggaaaccgaggggctgaagaagtccatccacaacctcgggacgatcttaaccaccaacgccgttgcctcagagacagtggccacgggcgaggggctgcggcagaccatcatcgggcagcccatgtccgtcaccatcaccaccaaggacaaagacggtgagctgtgcaaaaccggcaacgcctacctcaccgccgaactgagcacccccgacgggagcgtggcagacggggagatcctggacaacaagaacggcacctatgagtttttgtacactgtccagaaggaaggggactttaccctgtctctgagactctatgaccagcacatccgaggcagcccgtttaagctgaaagtgatccgatccgctgatgtgtctcccaccacagaaggcgtgaagaggcgcgttaagtccccggggagcggccacgtcaagcagaaagctgtgaaaagacccgcaagcatgtacagcactggaaaacgaaaagagaatcccatcgaagacgatttgatctttcgagtgggtaccaaaggaagaaataaaggagagtttacaaatcttcagggggtagctgcatctacaaatggaaagatattaattgcagacagtaacaaccaatgtgtgcagatattttccaatgatggccagttcaaaagtcgttttggcatacggggacgctctccggggcagctgcagcggcccacaggagtggctgtacatcccagtggggacataatcattgccgattatgataataaatgggtcagcattttctcctccgatgggaaatttaagacaaaaattggatcaggaaagctgatgggacccaaaggagtttctgtggaccgcaatgggcacattattgttgtggacaacaaggcgtgctgcgtgtttatcttccagccaaacgggaaaatagtcaccaggtttggtagccgaggaaatggggacaggcagtttgcaggtccccattttgcagctgtaaatagcaataatgagattattattacagatttccataatcattctgtcaaggtgtttaatcaggaaggagaattcatgttgaagtttggctcaaatggagaaggaaatgggcagtttaatgctccaacaggtgtagcagtggattcaaatggaaacatcattgtggccgactggggaaacagcaggatccaggtttttgatgggagtggatcatttttgtcctacattaacacatctgctgacccactctatggcccccaaggcctggccctaacttcagatggtcatgttgtggttgcagactctggaaatcactgtttcaaagtctatcgatacttacagtaatggtgggcaggtggatacccgcttccatggtcttgcactataaactggaatggatttctcaatgcgggaccagattatgactagagtttttatgccagaaggaatcattggtgaactttccaaggttatttctgaatgtaacaatttccttaaaaatgacttatccaatttctgtatttcacctttagggttaaaaaaaactcttctactgaatctataaaaactgcagttttacatctgtgaactatggcttaagggacaggatttatgtagctaaactaattttgcaaatcaaacagacacttaaaaaaactagcatatgtaaaggtattcgttaatcctgtgaatggtagcttttgcacagaacttccaaaagcaaaacaaaaacaaaatctattgtagttatatacttcatttaacctaggtcacaagacccagggaatcttctaacctcacttttacagtaggtattactcttgtgacatttttttggttatcaacaactaaatataaattactttggaaaaagtaaggctgtcttgcaaaatgatcccagctctgattagcagccctctggagttcagaacttaagtatcagtgcaaatttctcaacctttctgggttagacaaagatccttttttgtgtgttcttttcaccacccctttggctcaccttgtatcagcaaacaaagtacttcttcagggaaacctgaaatttctaatgccttgaaaagcatattacaaaagtaatgctaccttttgggaaacaaactgccccgttaactccagatcattgcactggaatgtaatcaagaaagttagtcatgttttatgtaccatgttttcacacgtgtctcttctcttcgacttcctgaaagcgaaagctttacctcctgcaaatgtcagcacatgtagtaggacaccagtatcctaggacagagagccataagtagccctttggaggactgatggtgtcaaccaaaggcatgtgattgattaatgattcccccttagaaagcaagtgttaccaaagttgtgttatcttgaaagcattacaggtaagggcatgttatggttatttatcattgtttaatgaatagtagaggtgtcaagggactatgtatacatgattagggtaagatagaatgtattatatatatatatatatatacacacacacatatatatagctgaatctttggtgtattgaaataggcagcactctgaaagacagaagcttcgtccagccactcttcagcacattcctttactaagcagtttaaagccgtcctagtggagcaagccctaaagcagatttaatttttgccattttccaagaatgacggtggtggcttttagtcagaaaatggccttctgtgctttcaaaaaaaaaacaaaaaaaaaaccacacacacacataaaaaacccaacaggtcaaaataaaagttgaacttgagttacatttaatttaaatataaatgcattttgagaaatgttaagaacaatttagtcaatcgttcatctgtcattggtactgtaaaataagctgtggtctatttccactgtttaattttctactcagttctaccaaataggatgtcatgtttgacatttttgatagtgactttggggtcttcttcactgaaagcaccttagaactgtactataagaaaacatttcccctatgtataattatatgaatgtgatgtttattgcttattaatttataattcagtcattctctatataggacttcttaaaatttagaagggaaatctagctacttcaaattgtctgttaaatttattatgcccaaatcaacctctgaaaaaaggtttttccaggaagatttacatttaggtttaatatttttttagttaggtagagttttaaaaaatacttgagcctgtccgtgataaagctataaaattcaataactttttagaatgttaaatgaagacactgtttcctaacatcagtgagatacatctttgaatttaaacattcatatttactgagtacctactaggtaccaagtactcttttaggcactggaaatacagtgatggacaaaacaggtaaaaaatcgctgccccctcagagctgacattctggggtgggaatttcattttgccacgtactaacgttctgcacaaaagacaggctagactcttgtctagattgtttaaaagaaacttttcaaattggttacattaattttagtttattttcacaagtaaaaatggctttttatttagattctttctgtcccaggctgttgatcttaaaactagttgatttaaagagtttttttgcacaacatttcaattatatttgtgaacttagaaattaacttacaatctaaccagccatcatatcatatcctatcaggctagatatctcaatagtagactgaatacaaagctaattttttttacatgtcaatattggcacaaactggaatgaaagaatagtttgattcagacctgctccactatgtgttgctaaaacacatgctatgagcactcgaggaaacactatattttttccaaaaaatatgtgattatatatgttaaagtatagataacatttcacacttggatacatatgtgcatttactgtatttcttggtaagcatatttttgggggaaagtgctgctgatatgatacaagtagacaaaatttaaatgaaattttgtcacattctatggaaaatggtttctggtaaactgagaaggatattaaaataagtggcttttttctgggctaccattattgtttgatttctctttgtcaagtgtatagaacctgtcatacattcatgataagtagcactgaaaaattactcattcaaatttcccctgggcacgtaaggcaaaatattgccggttgggatttcaaggtcagtgacgacgcatttcctcccagtacagaccccccagccccccttgctggacatggggaggcagagagtcacttgaccatccagaaatacatgactacaagtcctttatgactgtttgccattttttttaatggtacttagtattttgatcaaactttagtctccagaactaaacaagtccctaagtttccttattttaatttactgtgactagatttgaagcaaataaatactccagatccatgcagctagaacacacttgcttccactactaaatatacagggtatgtcctaacatggagttaactggaatagcagtacactagcaagtatctgtgaatccttagcactgacgggttaacagaaatgctttggtaatacctacttagttaattggaggaagtagtaaataaacattaggtaatctgcagattacttcaaatgggaaaaatctttttgtagactctatagtaccctctctattcactagcttctgaaaagggaggagtatttttagtttgacaatttaataatttaaaaacaagacatctccaggtaggaaaaaatgaaagctatttcatgcaaacattatctaatttagcttaaaagtgaaagtggtaatactgttggtttctgtaaatgttgcagggttttaaactttataattactttaatatttttgataactagaaatctagtattgccataaaggaaactaagtgcccatcaaagatttgtttggtataaataaagaattatttgttttgttttcaatgacagtaagctacaaatcatgatgcttaaaaactttctaaagatgaattgtgtggcagtgattggtctgtttgtggagaatgtatgaaagctattaatattctagaatagattaataaattggctatgttgttccaatgaatgtacagcacttccattaacttttgaaagcaacacagccttaaactcaatgcttttgctttatgacatgggaatgttctgtcatcaatggagtgtattcttgtaatagaattctttatatcgttctcaattctatagactttcaagcctatgtatgaatatgaaggggtttttttttttttgctttgttttctttttagattttgtacattccatctttataggtctgtttcatatgttttatgtatagaacactaagtcttgcactctctgacattgatactgatatattctcgtcatttgttcttttatgaatcaaaatgttgactgcctatttaaagaaaagaatgaacgctgtgcatcaaagtgtttgtatgttcgtagctacatacgtaccacagtattttggatgctttagtctacaatgaaactttcaattaattctgtcttgaaacataggagaaacaggattcatgtgtatctctttaccatgcacaaaatctcaaatcattataataaagcttgttttctccatttgc

SEQ ID NO: 274 - DNA, 3851 bp, Homo sapiens
  Genbank Accession No. AB017365
ctctcccaaccgcctcgtcgcactcctcaggctgagagcaccgctgcactcgcggccggcgatgcgggaccccggcgcggccgctccgctttcgtccctgggcctctgtgccctggtgctggcgctgctgggcgcactgtccgcgggcgccggggcgcagccgtaccacggagagaagggcatctccgtgccggaccacggcttctgccagcccatctccatcccgctgtgcacggacatcgcctacaaccagaccatcctgcccaacctgctgggccacacgaaccaagaggacgcgggcctcgaggtgcaccagttctacccgctggtgaaggtgcagtgttctcccgaactccgctttttcttatgctccatgtatgcgcccgtgtgcaccgtgctcgatcaggccatcccgccgtgtcgttctctgtgcgagcgcgcccgccagggctgcgaggcgctcatgaacaagttcggcttccagtggcccgagcggctgcgctgcgagaacttcccggtgcacggtgcgggcgagatctgcgtgggccagaacacgtcggacggctccgggggcccaggcggcggccccactgcctaccctaccgcgccctacctgccggacctgcccttcaccgcgctgcccccgggggcctcagatggcagggggcgtcccgccttccccttctcatgcccccgtcagctcaaggtgcccccgtacctgggctaccgcttcctgggtgagcgcgattgtggcgccccgtgcgaaccgggccgtgccaacggcctgatgtactttaaggaggaggagaggcgcttcgcccgcctctgggtgggcgtgtggtccgtgctgtgctgcgcctcgacgctctttaccgttctcacctacctggtggacatgcggcgcttcagctacccagagcggcccatcatcttcctgtcgggctgctacttcatggtggccgtggcgcacgtggccggcttccttctagaggaccgcgccgtgtgcgtggagcgcttctcggacgatggctaccgcacggtggcgcagggcaccaagaaggagggctgcaccatcctcttcatggtgctctacttcttcggcatggccagctccatctggtgggtcattctgtctctcacttggttcctggcggccggcatgaagtggggccacgaggccatcgaggccaactcgcagtacttccacctggccgcgtgggccgtgcccgccgtcaagaccatcactatcctggccatgggccaggtagacggggacctgctgagcggggtgtgctacgttggcctctccagtgtggacgcgctgcggggcttcgtgctggcgcctctgttcgtctacctcttcataggcacgtccttcttgctggccggcttcgtgtccctcttccgtatccgcaccatcatgaaacacgacggcaccaagaccgagaagctggagaagctcatggtgcgcatcggcgtcttcagcgtgctctacacagtgcccgccaccatcgtcctggcctgctacttctacgagcaggccttccgcgagcactgggagcgcacctggctcctgcagacgtgcaagagctatgccgtgccctgcccgcccggccacttcccgcccatgagccccgacttcaccgtcttcatgatcaagtacctgatgaccatgatcgtcggcatcaccactggcttctggatctggtcgggcaagaccctgcagtcgtggcgccgcttctaccacagacttagccacagcagcaagggggagactgcggtatgagccccggcccctccccacctttcccaccccagccctcttgcaagaggagaggcacggtagggaaaagaactgctgggtgggggcctgtttctgtaactttctccccctctactgagaagtgacctggaagtgagaagttctttgcagatttggggcgaggggtgatttggaaaagaagacctgggtggaaagcggtttggatgaaaagatttcaggcaaagacttgcaggaagatgatgataacggcgatgtgaatcgtcaaaggtacgggccagcttgtgcctaatagaaggttgagaccagcagagactgctgtgagtttctcccggctccgaggctgaacggggactgtgagcgatccccctgctgcagggcgagtggcctgtccagacccctgtgaggccccgggaaaggtacagccctgtctgcggtggctgctttgttggaaagagggagggcctcctgcggtgtgcttgtcaagcagtggtcaaaccataatctcttttcactggggccaaactggagcccagatgggttaatttccagggtcagacattacggtctctcctcccctgccccctcccgcctgtttttcctcccgtactgctttcaggtcttgtaaaataagcatttggaagtcttgggaggcctgcctgctagaatcctaatgtgaggatgcaaaagaaatgatgataacattttgagataaggccaaggagacgtggagtaggtatttttgctactttttcattttctggggaaggcaggaggcagaaagacgggtgttttatttggtctaataccctgaaaagaagtgatgacttgttgcttttcaaaacaggaatgcatttttccccttgtctttgttgtaagagacaaaagaggaaacaaaagtgtctccctgtggaaaggcataactgtgacgaaagcaacttttataggcaaagcagcgcaaatctgaggtttcccgttggttgttaatttggttgagataaacattcctttttaaggaaaagtgaagagcagtgtgctgtcacacaccgttaagccagaggttctgacttcgctaaaggaaatgtaagaggttttgttgtctgttttaaataaatttaattcggaacacatgatccaacagactatgttaaaatattcagggaaatctctcccttcatttactttttcttgctataagcctatatttaggtttcttttctatttttttctcccatttggatcctttgaggtaaaaaaacataatgtcttcagcctcataataaaggaaagttaattaaaaaaaaaaagcaaagagccattttgtcctgttttcttggttccatcaatctgtttattaaacatcatccatatgctgaccctgtctctgtgtggttgggttgggaggcgatcagcagataccatagtgaacgaagaggaaggtttgaaccatgggccccatctttaaagaaagtcattaaaagaaggtaaacttcaaagtgattctggagttctttgaaatgtgctggaagacttaaatttattaatcttaaatcatgtactttttttctgtaatagaactcggattcttttgcatgatggggtaaagcttagcagagaatcatgggagctaacctttatcccacctttgacactaccctccaatcttgcaacactatcctgtttctcagaacagtttttaaatgccaatcatagagggtactgtaaagtgtacaagttactttatatatgtaatgttcacttgagtggaactgctttttacattaaagttaaaatcgatcttgtgtttcttcaaccttcaaaactatctcatctgtcagatttttaaaactccaacacaggttttggcatcttttgtgctgtatcttttaagtgcatgtgaaatttgtaaaatagagataagtacagtatgtatattttgtaaatctcccatttttgtaagaaaatatatattgtatttatacatttttactttggatttttgttttgttggctttaaaggtctaccccactttatcacatgtacagatcacaaataaatttttttaaatac

SEQ ID NO: 275 - DNA, 5677 bp, Homo sapiens
  Genbank Accession No. AB020629
cagaagtcaaatagttaaagcaaattctagatacatggtagagaccaggagaaaatatgaataactttcttctaaacaaggagctcagtggataaaccatacctctagattccttgcttccattttcccagaaacaagatgaggaagagaaagatcagtgtgtgtcaacaaacttgggccttattatgcaagaactttcttaaaaaatggagaatgaaaagagagtccttaatggaatggctgaattcattgctcctactactttgtttgtatatatatcctcatagtcatcaagtaaatgatttttcttcactgcttaccatggacctgggacgggtagatacatttaatgaatccagattttctgttgtatacacacctgtcaccaacacgacccaacagataatgaataaagtagcctctactcccttcctggcaggtaaagaggtcttgggactgccagatgaggaaagtattaaagaattcacagcaaattatcctgaagaaatagtaagagtcacctttactaatacatactcatatcatttgaagttcttgctaggacatggaatgccagcaaagaaggagcacaaggaccatacagctcattgttatgaaacaaatgaagatgtttactgtgaagtttcagtattttggaaggaaggttttgtggctcttcaagctgccattaatgctgctattatagaaatcacaacaaatcactcagtgatggaggagctgatgtcagttactggaaaaaatatgaagatgcattccttcattggtcaatcaggagttataactgatttgtaccttttttcctgcattatttcattttcctcattcatttactatgcatctgttaatgtcacaagagagaggaaaaggatgaaggccttgatgacaatgatgggtcttcgggattcagcgttctggctctcctggggtttgctctatgctggtttcatcttcattatggcccttttcttggcacttgttataagatctacccagtttatcattttgtctggcttcatggtagtcttcagcctctttctcctgtatggattatctttggtagctttggctttcttaatgagcatcttggtaaagaaatctttcctcaccggcctggtcgtgttcctcctcactgtcttttgggggtgtctggggttcacatcactgtacagacaccttcctgcatccttggagtggattttaagcttgcttagtccctttgccttcatgcttggaatggcccagcttttacacttggactatgatttgaattctaatgcatttcctcatccatcggacggctcaaatctcattgtagcaacaaatttcatgttggcatttgacacttgcctctatctggcattggcgatttactttgaaaaaattttgccaaatgaatatggacatcgacgtccacctttgtttttcctgaagtcctcattttggtctcaaacacaaaagactgatcacgtggcccttgaagatgaaatggatgccgatccttcatttcatgactcttttgaacaagcgcctccagaattccaagggaaagaagccatcagaatcagaaatgttacaaaagaatataaaggaaagcctgataaaatagaagccttgaaagatctggtatttgacatttacgaaggccaaatcactgcaatacttggtcacagtggagctggaaagtcaacactgctaaacattcttagtgggttgtctgttcccaccaaaggttcagtcaccatctataacaataagctttcagaaatggctgacctagaaaatctcagcaagctgaccggagtttgtccacaatccaatgtgcaatttgacttcctcactgtaagagaaaacctcagactctttgctaaaataaaagggattctgccacaagaagtggataaagagattttcctgttggatgaaccaactgctggattggatcccttttcaagacaccaagtatggaaccttctgaaagaacgcaaaacagaccgcgtgatcctcttcagtacccagttcatggatgaggccgacatcctggcggacaggaaagtatttctctcccaagggaagctaaagtgcgcgggctcttctttgtttctaaagaagaaatgggggattggatatcacttaagcttgcagttaaatgaaatatgtgttgaggaaaacataacatcacttgttaaacagcacatccctgatgccaaattatcagccaaaagcgaaggaaaacttatttatacattacccttagaaagaacaaataaatttccagaactttacaaggatcttgatagctatcctgacctaggaattgagaattatggtgtttccatgacaactttgaatgaagtattcctgaagctagaaggaaaatctacaattaatgaatcggacattgctattttgggagaagtacaagcggaaaaagctgacgacactgaaaggcttgttgagatggaacaagtcctctcttcacttaacaagatgagaaagacaataggtggtgtggctctctggcgacagcaaatctgcgcaattgcaagggttcgcttgttaaagttaaagcatgaaagaaaagctcttttagcactgctattaattctaatggctggattttgccctcttcttgtggagtataccatggtgaaaatatatcaaaacagttacacctgggaactttctcctcatttgtatttccttgctcctggacaacaaccacatgaccctctcactcaactactgatcatcaataaaacaggggcaagcattgatgactttatacagtctgtggagcaccagaacatagctttagaagtggatgcatttggaactagaaatggcacagatgacccatcttataatggagccatcacagtgtgttgtaatgaaaagaattacagcttttcgttagcatgcaatgccaaaagattgaattgcttcccagttcttatggacattgttagtaatgggctacttggaatggttaaaccatcagtacatatccgaactgaaagaagtacatttttggagaatggacaggacaatccaatcggattcctggcatatatcatgttctggctggttttaacatcgagttgcccaccttacattgccatgagcagcatcgatgattataagaacagagctcggtcccagctacggatttccggactctccccttctgcttactggtttgggcaggcgctggtggatgtttccctgtacttcttggtcttcgtttttatatatttaatgagctacatttcaaacttcgaagacatgctacttacaataattcatattattcaaatcccatgtgctgttggttattccttttccctcatcttcatgacatacgtgatttccttcatctttcgcaaggggagaaaaaatagtggcatttggtcattttgtttctatgttgtcactgtattctctgtggctggatttgcgttcagtatcttcgaaagtgatattccatttatcttcacttttttaataccacctgccacaatgattggctgtttgttcttatcttctcatcttctcttttcttctctcttttctgaagaacgaatggatgtacagccatttctggtattcctaattcctttccttcattttatcatttttctttttactcttcgatgtctggaatggaagtttggaaagaaatcaatgagaaaggatcctttctttagaatttctccaagaagtagtgatgtgtgtcaaaatccagaagaaccagaaggagaggatgaagatgttcagatggaaagagtgagaacagcaaatgccttgaattctactaattttgatgagaagccagtcatcattgccagctgtctacgcaaggagtatgcagggaagaggaaaggctgtttttccaagaggaagaataagatagccacgagaaatgtctccttctgtgttagaaaaggtgaagttttaggattattaggacacaatggagctggtaaaagcacatccattaaggtgataactggagacacaaaaccaactgctggacaagtgctactgaaagggagcggtggaggggatgccctggagttcctggggtactgccctcaggagaacgcgctgtggcccaacctgacagtgaggcagcacctggaggtgtacgccgccgtgaaagggctgaggaaaggggatgctgaggttgccatcacacggttagtggatgcgctcaagctgcaggaccagctgaagtctccggtgaagaccttgtcagagggaataaagagaaagctgtgctttgtcctgagcatactggggaacccgtcagtggtgcttctggatgagccgtcgaccgggatggaccccgaggggcagcagcaaatgtggcaggccatccgggccacctttagaaacacggaaaggggtgccctcctaaccacccactacatggcagaggctgaggccgtgtgtgaccgagtggccatcatggtatctgggaggttgagatgtatcggttccatccaacacctgaaaagcaaatttggcaaagattacctgctggagatgaaggtgaagaacctggcacaagtggagcccctccatgcagagatcctgaggcttttcccccaggctgctcggcaggaaaggtactcctctctgatggtttataagttgccagtggaagatgtgcaacctttagcccaagctttcttcaaattagagaaggttaaacagagctttgacctagaggagtacagcctctcacagtctaccctggagcaggttttcctggagctctccaaggagcaggagctgggtgattttgaggaggattttgatccctcagtgaagtggaagctcctcccccaggaagagccttaaaaccccaaattctgtgttcctgtttaaacccgtggttttttttaaatacatttatttttatagcagcaatgttctatttttagaaactatattataagtacagaaatggttctccgtgtggtgggaggaggaggttcgggtgctgggtaagtgccatgtcagtgtggacagaggcatttgactaagccaacctcctctcacagcctctgtatctctgcaggccatactggttccattgttctgtataatactgaataaataaatttacttttacatgatcgtataagtttctagataagataaacaaattctgtttaaatttttttaataaaaatcttaaaacactttttttctaacctagactgagaaattcatgtttacttttctaggtgtatgatactttgtaaagttgatactttcctaagaatttaacatgtcatatttttgaaatagatttaagtgtgcttcttattgctaaaaatactaaatgtcatgggtcatagtatctgatatcaatatcgttgataacatatccacaggtaacaccatgatgtaggcataaatggaaaacaaaaaccctactatttcaaatatattgtacttttttatttctgtaagccaactgtgtgccattttcactggacttttaaatctagactttagtgatgtctacattgtaaatgatcttttgtggatatttgtcacttggtttcagaaagttcacaaatgtagcaacagctcacatgactgagtaggtagaaaatgtgaaataaatctcatatatatagttttg

SEQ ID NO: 276 - DNA, 4217 bp, Homo sapiens
  Genbank Accession No. AB020713
cttcccggccccagccaaggctgtcgtttacgtgtcggacattcaggagctgtacatccgtgtggttgacaaggtggagattgggaagacagtgaaggcatacgtccgcgtgctggacttgcacaagaagcccttccttgccaaatacttcccctttatggacctgaagctccgagcagcctccccgatcattacattggtggcccttgatgaagcccttgacaactacaccatcacattcctcatccgcggtgtggccatcggccagaccagtctaactgcaagtgtgaccaataaagctggacagagaatcaactcagccccacaacagattgaagtctttcccccgttcaggctgatgcccaggaaggtgacactgcttatcggggccacgatgcaggtcacctccgagggcggcccccagcctcagtccaacatccttttctccatcagcaatgagagcgttgcgctggtgagcgctgctgggctggtacagggcctcgccatcgggaacggcactgtgtctgggctcgtgcaggcagtggatgcagagaccggcaaggtggtcatcatctctcaggacctcgtgcaggtggaggtgctgctgctaagggccgtgaggatccgcgcccccatcatgcggatgaggacgggcacccagatgcccatctatgtcaccggcatcaccaaccaccagaaccctttctcctttggcaatgccgtgccaggcctgaccttccactggtctgtcaccaagcgggacgtcctggacctccgagggcggcaccacgaggcgtcgatccgactcccgtcacagtacaactttgccatgaacgtgctcggccgggtaaaaggccggaccgggctgagggtggtggtcaaggctgtggaccccacatcggggcagctgtatggcctggccagagaactctcggatgagatccaagtccaggtgtttgagaagctgcagctgctcaaccctgaaatagaagcagaacaaatattaatgtcgcccaactcatatataaagctgcagacaaacagggatggtgcagcctctctgagctaccgcgtcctggatggacccgaaaaggttccagttgtgcatgttgatgagaaaggctttctagcatcagggtctatgatcgggacatccaccatcgaagtgattgcacaagagccctttggggccaaccaaaccatcattgttgctgtaaaggtatcccctgtttcctacctgagggtttccatgagccctgtcctgcacacccagaacaaggaggccctggtggccgtgcctttgggaatgaccgtgaccttcactgtccacttccacgacaactctggagatgtcttccatgctcacagttcggtcctcaactttgccactaacagagacgactttgtgcagatcgggaagggccccaccaacaacacctgcgttgtccgcacagtcagcgtgggcctgacactgctccgtgtgtgggacgcagagcacccgggcctctcggacttcatgcccctgcctgtcctacaggccatctccccagagctgtctggggccatggtggtgggggacgtgctctgtctggccactgttctgaccagcctggaaggcctctcaggaacctggagctcctcagccaacagcatcctccacatcgaccccaagacgggtgtggctgtggcccgggccgtgggatccgtgacggtttactatgaggtcgctgggcacctgaggacctacaaggaggtggtggtcagcgtccctcagaggatcatggcccgtcacctccaccccatccagacaagcttccaggaggctacagcctccaaagtgattgttgccgtgggagacagaagctctaacctgagaggcgagtgcacccccacccagagggaagtcatccaggccttgcacccagagaccctcatcagctgccagtcccagttcaagccggccgtctttgatttcccatctcaagatgtgttcaccgtggagccacagtttgacactgctctcggccagtacttctgctcaatcacaatgcacaggctgacggacaagcagcggaagcacctgagcatgaagaagacagctctggtggtcagtgcctccctctccagcagccacttctccacagagcaggtgggggccgaggtgcccttcagcccaggtctcttcgccgaccaggctgaaatccttttgagcaaccactacaccagttccgagatcagggtctttggtgccccggaggttctggagaacttggaggtgaaatccgggtccccggccgtgctggcattcgcaaaggagaagtcttttgggtggcccagcttcatcacatacacggtcggcgtctcggaccccgcggctggcagccaagggcctctgtccactaccctgaccttctccagccccgtgaccaaccaagccattgccatcccagtgacagtggcttttgtgatggatcgccgtgggcccggtccttatggagccagcctcttccagcacttcctggattcctaccaggtcatgttcttcacgctcttcgccctgttggctgggacagcggtcatgatcatagcctaccacactgtctgcacgccccgggatcttgctgtgcctgcagccctcacgcctcgagccagccctggacacagcccccactatttcgctgcctcatcacccacatctcccaatgcattgcctcctgctcgcaaagccagccctccctcagggctgtggagcccagcctatgcctcccactaggccgcgtgaaggttcccggaggatgggtctcagccgagcctcgtgcacccccaagatggaacatccctgctgcattcacactggaacaagcccctccagatgagtgccccggccccaggccagcttcactgccgtctcttcacacagagctgtagtttcggctctgcccattagctcattttatgtaggagttttaaatgtgtgtttttttcctttcaagtcttacaaagctaagactttttggctcattcctttttgcatggttgtctagggtttctggacaatgtgctgttgcatttttattttcctagccttgctaaaatctttcccttctcaagactttgagcagttagaagtgctctttagaagttgtctgtgggtgatgttactgtagtggtctcagggaaaggattgtccagttactttagggggtttttggtggggtttttccccctgtgaaaacttactttgcccctagtctggctgctgctaggacttctgaggagcaatgggacatgagtgtccctgtatctgcgccactgccgcaagggaagcctcaggaaccagcacctggaggccaggatagccaagccctgggtgagcgagaggctggagaacacaggagctcacccagggctgctgcccaaccatgggccactgtgaacagacttcagtcctctgtttttgtttcataagccgttgagacatctgatggacttggcttaggccctgctgggacatcccacgtgtgatccctttcactccatcaggacaccaggactgtccttaggaaaatgtccttgagatggcagcaggagtcatattttctgtgtgtgtgtttcggaaagccgctgtgtcctgcctcagcacaaagacccagtgtcatttgctcctcctgttcctgtgccactccagaacctcagcagatctgagccaccgcctgccagtgtgagaggcggccactttcatggcagcttatcaggcgcagggccccagacagcttcccagccggccctagagcccggcctgggccaatgatggagggcggccaccagcccagggcctgcccatccagaagggactccccagggcctgggggaggagacccttggaaaagtcctctcttcccagctcctgattctggatctgagattctcagatcacaggcccctgtgctccaggccgaggctgggccaccctcagggagatccagagactcatgcccatggccatccatgcgtggacgctgtgtggagagtccaggatgacgggatcccgcacaagctcccttcagtccttcagggctgggccatgtggttgatttttctaaagctggagaaaggaagaattgtgccttgcatattacttgagcttaaactgacaacctggatgtaaataggagcctttctactggtttatttaataaagttctatgtgatttttt

SEQ ID NO: 277 - DNA, 3403 bp, Homo sapiens
  Genbank Accession No. AB024704
caggtctgaggcgaagctaggtgagccgtgggaagaaaagagggagcagctagggcgcgggtctccctcctcccggagtttggaacggctgaagttcaccttccagcccctagcgccgttcgcgccgctaggcctggcttctgaggcggttgcggtgctcggtcgccgcctaagcggggcagggtgcgaacaggggcttcgggccacgcttctcttggcgacaggattttgctgtgaagtccgtccgggaaacggaggaaaaaaagagttgcgggaggctgtctgctaataacggttcttgatacatatttgccagacttcaagatttcagaaaaggggtgaaagagaagattgcaactttgagtcagacctgtaggcctgatagactgattaaaccacagaaggtgacctgctgagaaaagtggtacaaatactgggaaaaacctgctcttctgcgttaagtgggagacaatgtcacaagttaaaagctcttattcctatgatgccccctcggatttcatcaatttttcatccttggatgatgaaggagatactcaaaacatagattcatggtttgaggagaaggccaatttggagaataagttactggggaagaatggaactggagggctttttcagggcaaaactcctttgagaaaggctaatcttcagcaagctattgtcacacctttgaaaccagttgacaacacttactacaaagaggcagaaaaagaaaatcttgtggaacaatccattccgtcaaatgcttgttcttccctggaagttgaggcagccatatcaagaaaaactccagcccagcctcagagaagatctcttaggctttctgctcagaaggatttggaacagaaagaaaagcatcatgtaaaaatgaaagccaagagatgtgccactcctgtaatcatcgatgaaattctaccctctaagaaaatgaaagtttctaacaacaaaaagaagccagaggaagaaggcagtgctcatcaagatactgctgaaaacaatgcatcttccccagagaaagccaagggtagacatactgtgccttgtatgccacctgcaaagcagaagtttctaaaaagtactgaggagcaagagctggagaagagtatgaaaatgcagcaagaggtggtggagatgcggaaaaagaatgaagaattcaagaaacttgctctggctggaatagggcaacctgtgaagaaatcagtgagccaggtcaccaaatcagttgacttccacttccgcacagatgagcgaatcaaacaacatcctaagaaccaggaggaatataaggaagtgaactttacatctgaactacgaaagcatccttcatctcctgcccgagtgactaagggatgtaccattgttaagcctttcaacctgtcccaaggaaagaaaagaacatttgatgaaacagtttctacatatgtgccccttgcacagcaagttgaagacttccataaacgaacccctaacagatatcatttgaggagcaagaaggatgatattaacctgttaccctccaaatcttctgtgaccaagatttgcagagacccacagactcctgtactgcaaaccaaacaccgtgcacgggctgtgacctgcaaaagtacagcagagctggaggctgaggagctcgagaaattgcaacaatacaaattcaaagcacgtgaacttgatcccagaatacttgaaggtgggcccatcttgcccaagaaaccacctgtgaaaccacccaccgagcctattggctttgatttggaaattgagaaaagaatccaggagcgagaatcaaagaagaaaacagaggatgaacactttgaatttcattccagaccttgccctactaagattttggaagatgttgtgggtgttcctgaaaagaaggtacttccaatcaccgtccccaagtcaccagcctttgcattgaagaacagaattcgaatgcccaccaaagaagatgaggaagaggacgaaccggtagtgataaaagctcaacctgtgccacattatggggtgccttttaagccccaaatcccagaggcaagaactgtggaaatatgccctttctcgtttgattctcgagacaaagaacgtcagttacagaaggagaagaaaataaaagaactgcagaaaggggaggtgcccaagttcaaggcacttcccttgcctcattttgacaccattaacctgccagagaagaaggtaaagaatgtgacccagattgaacctttctgcttggagactgacagaagaggtgctctgaaggcacagacttggaagcaccagctggaagaagaactgagacagcagaaagaagcagcttgtttcaaggctcgtccaaacaccgtcatctctcaggagccctttgttcccaagaaagagaagaaatcagttgctgagggcctttctggttctctagttcaggaaccttttcagctggctactgagaagagagccaaagagcggcaggagctggagaagagaatggctgaggtagaagcccagaaagcccagcagttggaggaggccagactacaggaggaagagcagaaaaaagaggagctggccaggctacggagagaactggtgcataaggcaaatccaatacgcaagtaccagggtctggagataaagtcaagtgaccagcctctgactgtgcctgtatctcccaaattctccactcgattccactgctaaactcagctgtgagctgcggataccgcccggcaatgggacctgctcttaacctcaaacctaggaccgtcttgctttgtcattgggcatggagagaacccatttctccagacttttacctacccgtgcctgagaaagcatacttgacaactgtggactccagttttgttgagaattgttttcttacattactaaggctaataatgagatgtaactcatgaatgtctcgattagactccatgtagttacttcctttaaaccatcagccggccttttatatgggtcttcactctgactagaatttagtctctgtgtcagcacagtgtaatctctattgctattgccccttacgactctcaccctctccccactttttttaaaaattttaaccagaaaataaagatagttaaatcctaagatagagattaagtcatggtttaaatgaggaacaatcagtaaatcagattctgtcctcttctctgcataccgtgaatttatagttaaggatccctttgctgtgagggtagaaaacctcaccaactgcaccagtgaggaagaagactgcgtggattcatggggagcctcacagcagccacgcagcaggctctgggtggggctgccgttaaggcacagttctttccttactggtgctgataacaacagggaaccgtgcagtgtgcattttaagacc

SEQ ID NO: 278 - DNA, 4834 bp, Homo sapiens
  Genbank Accession No. AB029000
gatgtggagctggggtccctgcaagtcatgaacaaaacgagaaagattatggaacatgggggggccaccttcatcaatgcctttgtgactacacccatgtgctgcccgtcacggtcctccatgctcaccgggaagtatgtgcacaatcacaatgtctacaccaacaacgagaactgctcttccccctcgtggcaggccatgcatgagcctcggacttttgctgtatatcttaacaacactggctacagaacagccttttttggaaaatacctcaatgaatataatggcagctacatcccccctgggtggcgagaatggcttggattaatcaagaattctcgcttctataattacactgtttgtcgcaatggcatcaaagaaaagcatggatttgattatgcaaaggactacttcacagacttaatcactaacgagagcattaattacttcaaaatgtctaagagaatgtatccccataggcccgttatgatggtgatcagccacgctgcgccccacggccccgaggactcagccccacagttttctaaactgtaccccaatgcttcccaacacataactcctagttataactatgcaccaaatatggataaacactggattatgcagtacacaggaccaatgctgcccatccacatggaatttacaaacattctacagcgcaaaaggctccagactttgatgtcagtggatgattctgtggagaggctgtataacatgctcgtggagacgggggagctggagaatacttacatcatttacaccgccgaccatggttaccatattgggcagtttggactggtcaaggggaaatccatgccatatgactttgatattcgtgtgcctttttttattcgtggtccaagtgtagaaccaggatcaatagtcccacagatcgttctcaacattgacttggcccccacgatcctggatattgctgggctcgacacacctcctgatgtggacggcaagtctgtcctcaaacttctggacccagaaaagccaggtaacaggtttcgaacaaacaagaaggccaaaatttggcgtgatacattcctagtggaaagaggcaaatttctacgtaagaaggaagaatccagcaagaatatccaacagtcaaatcacttgcccaaatatgaacgggtcaaagaactatgccagcaggccaggtaccagacagcctgtgaacaaccggggcagaagtggcaatgcattgaggatacatctggcaagcttcgaattcacaagtgtaaaggacccagtgacctgctcacagtccggcagagcacgcggaacctctacgctcgcggcttccatgacaaagacaaagagtgcagttgtagggagtctggttaccgtgccagcagaagccaaagaaagagtcaacggcaattcttgagaaaccaggggactccaaagtacaagcccagatttgtccatactcggcagacacgttccttgtccgtcgaatttgaaggtgaaatatatgacataaatctggaagaagaagaagaattgcaagtgttgcaaccaagaaacattgctaagcgtcatgatgaaggccacaaggggccaagagatctccaggcttccagtggtggcaacaggggcaggatgctggcagatagcagcaacgccgtgggcccacctaccactgtccgagtgacacacaagtgttttattcttcccaatgactctatccattgtgagagagaactgtaccaatcggccagagcgtggaaggaccataaggcatacattgacaaagagattgaagctctgcaagataaaattaagaatttaagagaagtgagaggacatctgaagagaaggaagcctgaggaatgtagctgcagtaaacaaagctattacaataaagagaaaggtgtaaaaaagcaagagaaattaaagagccatcttcacccattcaaggaggctgctcaggaagtagatagcaaactgcaacttttcaaggagaacaaccgtaggaggaagaaggagaggaaggagaagagacggcagaggaagggggaagagtgcagcctgcctggcctcacttgcttcacgcatgacaacaaccactggcagacagccccgttctggaacctgggatctttctgtgcttgcacgagttctaacaataacacctactggtgtttgcgtacagttaatgagacgcataattttcttttctgtgagtttgctactggctttttggagtattttgatatgaatacagatccttatcagctcacaaatacagtgcacacggtagaacgaggcattttgaatcagctacacgtacaactaatggagctcagaagctgtcaaggatataagcagtgcaacccaagacctaagaatcttgatgttggaaataaagatggaggaagctatgacctacacagaggacagttatgggatggatgggaaggttaatcagccccgtctcactgcagacatcaactggcaaggcctagaggagctacacagtgtgaatgaaaacatctatgagtacagacaaaactacagacttagtctggtggactggactaattacttgaaggatttagatagagtatttgcactgctgaagagtcactatgagcaaaataaaacaaataagactcaaactgctcaaagtgacgggttcttggttgtctctgctgagcacgctgtgtcaatggagatggcctctgctgactcagatgaagacccaaggcataaggttgggaaaacacctcatttgaccttgccagctgaccttcaaaccctgcatttgaaccgaccaacattaagtccagagagtaaacttgaatggaataacgacattccagaagttaatcatttgaattctgaacactggagaaaaaccgaaaaatggacggggcatgaagagactaatcatctggaaaccgatttcagtggcgatggcatgacagagctagagctcgggcccagccccaggctgcagcccattcgcaggcacccgaaagaacttccccagtatggtggtcctggaaaggacatttttgaagatcaactatatcttcctgtgcattccgatggaatttcagttcatcagatgttcaccatggccaccgcagaacaccgaagtaattccagcatagcggggaagatgttgaccaaggtggagaagaatcacgaaaaggagaagtcacagcacctagaaggcagcgcctcctcttcactctcctctgattagatgaaactgttaccttaccctaaacacagtatttctttttaacttttttatttgtaaactaataaaggtaatcacagccaccaacattccaagctaccctgggtacctttgtgcagtagaagctagtgagcatgtgagcaagcggtgtgcacacggagactcatcgttataatttactatctgccaagagtagaaagaaaggctggggatatttgggttggcttggttttgattttttgcttgtttgtttgttttgtactaaaacagtattatcttttgaatatcgtagggacataagtatatacatgttatccaatcaagatggctagaatggtgcctttctgagtgtctaaaacttgacacccctggtaaatctttcaacacacttccactgcctgcgtaatgaagttttgattcatttttaaccactggaatttttcaatgccgtcattttcagttagatgattttgcactttgagattaaaatgccatgtctatttgattagtcttatttttttatttttacaggcttatcagtctcactgttggctgtcattgtgacaaagtcaaataaacccccaaggacgacacacagtatggatcacatattgtttgacattaagcttttgccagaaaatgttgcatgtgttttacctcgacttgctaaaatcgattagcagaaaggcatggctaataatgttggtggtgaaaataaataaataagtaaacaaaatgaagattgcctgctctctctgtgcctagcctcaaagcgttcatcatacatcatacctttaagattgctatattttgggttattttcttgacaggagaaaaagatctaaagatcttttattttcatcttttttggttttcttggcatgactaagaagcttaaatgttgataaaatatgactagttttgaatttacaccaagaacttctcaataaaagaaaatcatgaatgctccacaatttcaacataccacaagagaagttaatttcttaacattgtgttctatgattatttgtaagaccttcaccaagttctgatatcttttaaagacatagttcaaaattgcttttgaaaatctgtattcttgaaaatatccttgttgtgtattaggtttttaaataccagctaaaggattacctcactgagtcatcagtaccctcctattcagctccccaagatgatgtgtttttgcttaccctaagagaggttttcttcttatttttagataattcaagtgcttagataaattatgttttctttaagtgtttatggtaaactcttttaaagaaaatttaatatgttatagctgaatctttttggtaactttaaatctttatcatagactctgtacatatgttcaaattagctgcttgcctgatgtgtgtatcatcggtgggatgacagaacaaacatatttatgatcatgaataatgtgctttgtaaaaagatttcaagttattaggaagcatactctgttttttaatcatgtataatattccatgatacttttatagaacaattctggcttcaggaaagtctagaagcaatatttcttcaaataaaaggtgtttaaacttt

SEQ ID NO: 279 - DNA, 46275 bp, Homo sapiens
  Genbank Accession No. AC003107
gatcctgtctctatgaaatagaataaaaatttaaaaagatccacatgccatgttctccccagactcctctgaaaagagactgcccactgagggcaggagcagggggaggggacccatagggagaccctctctgtgcaactcttggcttcgcgctgggcatgtctggggcccgcccctccaccctggggcggtgcccctgtcctccatctgtggggctctgcggccccagcaagcttggttctcatgatgcatctctgggctttgtgggaagatcagccgtttcaaggaggcccagtgcccaggaggagggccccacagggtgtgccccagggctcaggctctcctgtcttctctttcagacggggtccaggcccaagtcctgtgaggtccccggaatcaagtaagtctccacagggcccaccccgcacactgcatctgctgcgctgctccgtccaccctggggcattctgtccactctcttgaggttgcaagtccctgcaagagggacactgtgtgaccagaggccagtgacagagcccccacatgcccacccctcaggcacctcattcccagggatgatgccctctcctgggttcagggaggttgctgcccccaggccccccaccgtcctcaccgggtgataggctgctttccaaggtctcagcctggtgccagccaacagtggtttcccaagcacacggcacctgatggggggtggccttttgcacccgctgattttctcccgccagccccctgtccccgccgccagccccgccccatgagctcacctcctgcctgcctctggccttttcccagcatcttcccgtctgccgaccaggaaaacactacagccctgatccccgccacccacaacacaggggggtccctgcccgacctgaccaacatccacttcccctccccgctcccgaccccgctggaccccgaggagcccaccttccctgcactgagcagctccagcagcaccggcaacctcgcggccaacctgacgcacctgggcatcggtggcgccggccagggtaaggcagggacactccgccctcggacagagcactggcttgtggagacaacacgggcatctgcaggatgacttggcagagtcccgttccaaatactagggcatgggggacagggctggggggcggccgacaggctgacccagcgggcacaggcatcccaggtaggggtggggcctgggtacaggcctggtggaaaggagtgcctggtgcccccagacaccagacagtgggtttgagggtgtgtgatggtgctttggggagtccaggagggaagccctgggagttttaacgcagctggggtgggccaggccttccctccgcccctcctcgaccccagcccctcattggggggcgggaccaggcctgacctgcttcctccacccgacatctgacagtgaccacctacttgtcacatcccagcaccaccacccccacccgtctccagctccacactcctttcttcctcagccacatccacagggacgtcgcacaggcccctcgcccgtcccaatagctcctggcgctgctgccgccctgctcccccgggacccccctcctgtggctgcactgattgcagaggtgtcccccaactcctctgtcctttcccagacatggacctgacccattgtcagcgtgtcctgtcggttccgccctcaggacctggcctgacctggctcctctccccaggcccccagccccctccccacctagaacagccaccagccatggcttcctccacttgggacctcgcacggcccccagctccctctcagtgaaagcctgaggcctccagggtctgggatgtccaccctggcccaccctccaccctctgaacttagccccagtcccacctcagggcctctgcacatgtagtccttcctctccaggaggctgcaggcctccctccctcccctgccctgccctgccctggtcagagctagtccccttggcaaggccgtcccggccctggcctctactgccgcgttgctttcctgcacccctgccctggcccacgttgctgctccgtccttagctgttgcctgcgtccccattggctgtgcagtgtgtgacctgcatcccgggggtggcaggcacctggcttccaaggaggagaaatggcgtggccccaactagtcctggggggtgggacaggctggaggggctgtgggggatgcactgggggtgggggtgacagacgccaccttgctgtgctctgtcttgccccagagctggagaatgaaccggccccggcccactccaccagcccatcctgcctctgccccaggcttggaaggcagcaccaggcagggctttctatgagatagtcacatgcttacatttgtaactggcggagtccccctggctgccctggaagaaggagcttttgggaggggcggccactggagcaggacagcaccccaattgggggctctgcctggagactccagggtgaaattggccagcctgggagctgggttgatgcagggagtgaaggagagggaggagcctggaggcgttcctggctttggtgccagcagggccaggggcaggcaaggggcgtggagggtggcgtgaatgttcctgggttttttggaggagggcatggggactagaatagtgaagagggaacagggccccagcccgagcgcattgaggctgcattctgactcccacacctgggccctgggccctgggcccgcggggctctgccactggacagagggcaccagagaaggcccagaaaacacagccgattcggaggagccctcttcattgtctccagatagacagggccaggcaggcggcatccacacgcacctgcgcagaaccagaaagctgaaggtcagcgctggggctgcaggtacccctgccccgcatagaagccaccatctcccagcccctgcttttcccctcacatctcttcacggccaccagagcacatggcccccttcccgctggagggtccttggcaggtccccagcgcccgcccgggagctgcgcacctccagcaggcacccagtctaaacaagcacaaggaaacacacaacatacgtggaagctggagccggcgctggccagagcggcccggtaatgcctgacatgtgttgggttgtttgtgaacctgccgcccaagcagctcgcctggcaggggctttgctttctggacgccttttaaatcaagccgagctgccggcccctggcacacacgaaggtggccccctccctcctcgcaagcccacccgccagtcagaacgtgagctccctcaggaaggaagacagaggccttcgcggccgaggagacagtaccccgcttggctccatctacatttcccatatccctggctgctttccagagtgcaggaggagggcaggccctggctcctccttcctggcccagctttgaggccgggcgggccctgacacctggcccgccctcccctggcagctctccctgcccgctccagacttcccctccagctggctctgtgcctgttcccaaaggtgagccaggttgccaaaaggaattcaacagcaaggctcccgtccgccctcctgggccaactggcctctccaggggtggccgagagctcactttgcagccagtggaagattaaaaactcccttgtattcagggcagacattagagactggcagcccaagggccaaatccagcccatggtatgtttcgtgtgggcccacagttgtgcatctgtaatacagccacacgccacatcttgacgtttctgacaacagcaaaccacataatcggcagtggccccatcagagtataatgctgtgtcttactgctccttttctaggcttagacacacaagtccttaccattgtgctacagttgcctactgtttttaattttttttttcttttttttgagacaaagtctcactctgtcacccaggctggagtgcagtggtgtgatctcggctcactgcaaccttcgcctcccagtcccaagcgattctcctacgtcaacctcccgagtagctgggagtacaggcgcccaccaccacgcctggctaatttttgtatttttagtagatacggggtttcaccacattggccaggccaatctcaaactcctgccctcaggtgatccgcctgcctcagcctcccaaagtgctgggattacaggcgtgagccactgtgcctggccgacggtattcaggacggtcaccctgtacaggtttgtagcctgggaacaagggccctaccgtctggccgaggtgtgcagaggctctgccatccaggtttgtgtaagttgccctgtgatcctcatgcacagccatgaaatcgccggacaacgcgttttttcagaagtcacccccattgttaagtgatgcttgactgtacttagaatcaacattgaaaaaccaggggaatgcccgtagaacaccagatttctggctgctcttgaagaatcagacagcccagtggccatggccgatgtcttgcacctcgagacgggccacagtgctctggtttgcctcaggccccacccgcccctgtcgtcccacatccataccctcacacgctcctgacgtttgcccctactttgtaccgagcccgacctctgcttctgacctgggcactgagcatctctcggcctgctggacgcacgaagtggcggacactcaggagaagatgagggagtggcccagggtcgtgactctgagtgtgctctgagcaggcttcccccacatcctcccgtccaggcctctgttgatgcctccctggacgccagggcctgcaaagggcgcttgctgcctggggagcagtcaacagcaccaggcttcctcccacagtgcgcagccaagcagagctgccagggcatccgaggggaagtgcaggcgtgaccgagctcgccccggtgagcagctgccctgggcacggacaaggctgtcatctcccctcggcgcttgtcgggtgtgttcccatgggcccacgcacccgccgtctcatctgccggaacaaggttaatctggtgcccagatctcctggggtgagtcaggcggcttcacccccgccttgactgcaggccagatgctcttcagagactgctcctgacctcaccagggcctcactttgaaccggagagggcggctgttatcgtcgccatctcaccaaccagggaaccaagtctccagagtggatgggggtcaggccaggctcgcaggggtcctcctgccatcgaggggcctgttgcctgcctggcatggtgcccacaataacccagccagccccagctactgccatgttgaacttgacctcacccagcttcatcactgcagcagaatccaaggattgggttgctcagtgcaagggccttcggggccggggtgagggaaggggtgatgaggcggctcctggcaggacctccagcaggaatgatgtgtcagaccccagggcagagagggggaaggatgttaaggagtgacattctttagttcagacagcctgatgggtggcactgcagcttggggaatgcaccaggtctggggaggaggaagtggctgtgggacataggggatagcaggtgctcaggtctgggggccaagagaagcagctgcaggaatgggcacattcactgaaggagggcaagatccacgaggtggtgggcaaaaccacagcattgggcagggcctgctggcttgaagctaaccacaacccaagccattttcagccaaaaaaaaccatttattgtctcctgaaagtgggaagcaggctcagatgctgcctctcccctgcagcccttcagctggctcctcacctcgccacaggatgccccacacacggcttcagacagcccttcctggaattccatccaaagcccctgggaaggctctcattgggccagcctggttacatgcccatctgggggccaatcttatgctccagagatggggatgtgctggttggctggctgtgagacacccccttcctggaaggaaggagaacagactctgcaggactgtgggaccctcgggtcaggaatcagggccttcggggggtgcccaggtttggcagttgggacatgtccatgggcttctgtctgagcagttgagctattcccatgcagtgtgactgtgggtgtgtaagcagccctttctcagtgatcagtctcacacctgctctccctccctcctacttcctctctaggaatgagcacacctggctcctctccacagcaccgcccagctggcgtcagccccctgtccctgagcacagaggcaaggcgtcagcaggcatcgcccaccctgtccccgctgtcacccatcactcaggtgcgagggcaaggtggggggcaggtgggagggggaaagggaaaggtggaggcctggctctacctcttagaaggcctcctgttccttccaggaggccacaaaaccttgagaatgctcccaacacttttagtttttattatcaaattttcaagccgggtgccgtagctcatgcctgtaatcccagcactttgggaggctgaggcgggtggatcagttgaggtcaggagttcgagaccagcctggccaacatggtgaaacctcgtctctacaaaaaatacaaaaattagctgggcatggtggtgtgcgcctgtggtcccagctactagggaggctaagatgagaggatcacttgagcccagggggtggaggctgcagtgagccatgatcacaccactgcactctaccctgggagacagagtgagactctgtttcaaaaaaaaagaaaaaactcaagaggttagcttttgatttttcaatttgctgtatttgcttgtctacttttttgggtagtttgtatgtgtctaggaatttgtccatttcgtctttgctatccaacttgatggcagaaaatttttcataatactcttttgtaatcctttttttttttttttaagacgaagttttgctctgtagcccaggctggagtgcagtggcatgatctcggctcacggcaaccttgcttcctgggttcaagccattcacctgcctcagccttccaagtagctgggactacaggcatgtgctaccatgcctggctaattttttttttttttttttttttggtatttttagtagagatggggtttcaccatgctggccaggctggtctcgaactcctgacttcaagtgatctgcctcctttggcctccaaaagtgctgggattacagatgtgagccaccgcgcctgaccgtaatcccttttttaaaaaaatttttgagacagagtctcgctctgtcacccagggtggagtgcagtggcgtgatcttggttcattgcaactctgcctcccaatttcaagcaattcttgtgcctcagccacctgagtagctgggattacaggtgaccgccaccacgcctggctaattaaaaaaaataataatagagatggggttttgccatgttggccaggctggtctcgaactcctggcctcaggcaatctgcccacctcggcctcccaaagtgctgggactataggcgtgagccaccacacccagccttgtaatcctttttatttacgtaaagttggtagcaaagttcccattttcattttctgattttagtaatttgaatcttccctcttttttacctaatcaatgcagcttcatagaatgagttaggaatgttcacttctcttctattttttggaagtatttttaattcctctttaaaagtttggtaaaattaggcgggtgtaatggtaaattcctgtagtcccaggtttggtaaaattcaccagtgcagccacctgtgtcttagctcaaatgtgttgggaagtttccaatctcatctccttcttataaggctattcaggttttctgttttttcttgagtcagttttggtcatttgtgcatttctagaaatttatccattttgtctttttaaaaacaaaacaaaaaaaccctaacagagaactttgacatttttaaaatttttttattttttaattttaatttaattttttttttgagacagagtctcactctgtcgcccaggctggagtgcagtggcgtgctcttggctctcctgcagcctctgcctcccaggttcaagcgattttcgtgctagcctcccaagtagctgggattacaggcatgtgcctaccatgcccagctgagttttgtatttttagtagagacagagtttcgtcttgttgaccaggctggtctcaaactcccaacctcaagtgatcaccctgtctcagctttccgaagtgctgggattgcaggtgtgagccaccgcgcccgtcacttgtttgtttttaatgtaaccacagtggcattgtccacctacaacgaagttaatggtagttccttggtacctggcaatgcccggcccggactccatttctccccgcccctcggcccccatgtctcctgtctgcttacaaaggtgtcttattcagatcaagatccagacagagctgtgggcgctggctcctggcagctgtgtcttcagccactttgtgagctaggctgtcttaatctgacacctgccccttccctctatctggaaactcctttctcttcacaaatgacccactggtcctcagaggccgggcatcctgctaagtggtttttgttccatagctcctgggcacgctcagcctttcttagagggcagggaccccacctttcccaaggactgtcagcttggtagcccctggctgtgagtttccacacagacagtgaacgtcacacacttccctcttattgattttcctctttccagctctgcgaaggcctgagccagcccttggtgaggggccatgctggtatctccagcaaccccagcctctccagcatccccagagtgggcaaggctttgggcgggggggtttgggaaggcaaggccagtggatcacttgaggtttccccgcagcacccacaggggctgggagctggctgctcactgagccaccagggatggccatcctgggcttgccctgcagctggtggactggcctgagctgcacggcatgtagtgcgggtgcaggcacaacaagctggaggaggtcaggtcctgcccagctccagctgacccccttggggccctgcgtgaggcccaccctctctagcctgggctccctcatcgtgaggagcacccagcccaggggctgcctgtgatcacagggcccttccacctcgcctgctgagcatgccaggctatgggggcccgagggggccaggcgctgacaaccagggcccgccctgcctgacgctctcctctcctgcaggctgtagccatggacgccctgtctctggagcagcagctgccctacgccttcttcacccaggcgggctcccagcagccaccgccgcagccccagcccccgccgcctcctccacccgcgtcccagcagccaccacccccgccacccccacaggcgcccgtccgcctgccccctggtggccccctgttgcccagcgccagcctgactcgtgggccacagccgcccccgcttgcagtcacggtaccgtcctctctcccccagtcccccccagagaaccctggccagccatcgatggggatcgacatcgcctcggtaagcccagggtggggtccctcggggcctgactgggggtcttgtagaggacagcccgggggctgcagaacagtcgggttacctgctgcatgggccaggggtcagaaccccagcgaacgctgcctgggcccacctctccacggggctaccccttggaatcaaactgagactgtcactccctgtagagatggagaaactgaggcacgagcaggtggctggccccagattccacccaaggtgggccaccccatgtttaactgccgagcaccccttcttggcctctctggcccctcccacctgaagccaggcttcctaggaggcaagaagagtacggcgttctcagggccagggcgcaggccgggggccggggatgacgtgagcttatcagagaaggaaagacgaggccagtccaagaggcggcagcccgttgggcacagcgcctggggcccagggctgggggctgcagctcagaccattggacttttctgcctagggccggctcaggcagacaaaggctgggctttaaccctgtacccacaaaccttcctgactgtccagaccacctgcttgctccagcggcgcgggctgggtggcaaacagctgcattgggccacatccagggaaacagggacttgtgttccgggcacaatgagtcctcccacttgaccccgactgccagccccaggctaaatgtcctccaaacattgtgtgctctgcaaagaacagccgcctgagctgggtggggcaggcaggtgagcctgtgggtagacacccatgttcccaagctgctctgacctcacggaggggaccacccacggcccctgggtggaagagtgcccaagtcctttctttggtggaaacacagcaggtcctgggggaggctcccaaggtggggcctcgccttggagctgggtggttcttggagtcacagggtgtctgggccaggtgcagggacggcccttctagggctcttgggtcaggctgtccatgtccagcaccctcacacaacaaagacggcttcctgcccccacttcaaggacttctagcctcctggggttgaggggggactcttgagtttttgcacagactcacccaaatgagaatctccctctgatccctttgtcctttccaactccaggaaggcccaagtcagccatccctaagtaacagtgctggcacctccatcacccacgcaggcgagctcaccgccaccccccgccctaccccaccccgccccacctggactcaagccctaccccaaactgcccagaaggcgccaccaaggacatgggggagacagcaattataggccctggaccggtcaggctgggcctcattcagtgactggctcagacaggtcaggcaagttgtctgcaggcacacagcatggctgggccgtgctaggacaagagagtggtctgaatccggggcctggcctggcccgacctgcctctgaaagttctgggtcatagcagtgagatgcccgggcctttcgtccctcgagcaggtggaggaagtgactgccccttgcaggtctcagatggcataacccaggcaggtttgtcctgcagcagggcagggatagtgactgcgccatgctgggagcctgggctaccagcaagatggccttcactcagtccccacccccagaggtgggccagacctgctgggctgcagacttaggggcttagagagccaggggacctgcccagggcacacagtcagcgagagccgggaacaggaggcagccttgggttttccctgcccatggcggtgtgtgtgtgtgggttgtgggtgtgcacaagtgggtgggtgcgggtgtatgtggtgtgcacctgcatgggtgtgcatgcatgtgaatgtgtgtgcatgtgtgcatgcgtgggtatgtacatttgtggatgtgtggacatttgtggatatgtggacatttgtgtgtggatatgtgtgcttgtgtgggtgtgtgcacacggtgtgtacattttggtgtgtgaatatatgtgtgtgtgggtgtgtacatgcgtgggtgtgtccatgtgggtgtgggtgtgcatgtgggtgtgggtgtgcatgcgtgggtgtgtacatttgtgtgcatgtgtgcatttgtgggtatgtacgtttgtgtgtggatgtgtgcctgtgtgtgtgcatttgtgggtgtgagtatgcgtgtgtgtgcatgtgtgggtgtgcatgcatgggcatgtacattcatgtgtggatatgtgcacatgtgtgggtgtgcatgtgtgggtatgtatattctagtgtggatatgtgtacacgtgggtatgtctgtgtgggtgtgcatgcatgagagtgcacacgttgctatatggctctgagcctgctgagtcagggccaaccctctgatcaccctcctgtagctccaagaaggagggcagttattcaccctccacgccgttccttcctgggttcgggggcagctccccggaggctcaggtacccacctttcctgcaggtgtccaggctcctctgcctaccagtggggtggcgaccatcaccaaggtgtgaggggcggggggacctgcctgggggctgatcaggctgctcccgggaagcagggactggagcccgggcttgggcagctgggctgcggcgtgctgatctgtctgtcatcgcaggcgccggctctgcagcagtaccgcactagcgccggctccccggccaaccagtctcccacctcgccagtctccaatcaaggcttctccccagggagctccccgcaagtaaggggcgccgcctcccccttggcctgtgggctccacgcttgtcttgttcatgccccgtgtgttccctgcccactgtctgtcctcatgcatcgctcctcatgcatgtcctcatgcatcccatcccgtccacgccatcggacctgagctgtgcacctaccaggctgcaccagggcaggaaccccacagggtccttcccaggagccgccagagcctgcctctgctgaacactaggtgggggtgtgcgttagtgacattagcgatggctgtggccctgcctggatgtcctcattgagtggcccagggacaatgccctccacacccagtgtgtcacccagagcatgagctggagctttagggacccccccgacttgggggtgcagctgaggtggctggcccgcccgcagggaaggcgctgactctgcagccctgctttccccttcaccccataggcagctgtgtttctccagaaccactggcccaggaggcttctctgagccgctctgcagtgtctcagggcccttgtccccattccacagacgggagactgaggtcagcctcaaacctcacccatcagccctgggttttcctgttgcacccagcaccgtaggaccctggcttgctcacgccccagccactccaaggttcaggttcctcggaatgccccttcgttctgcctggccagtggaagcggccagcctggctccccactcagcctcctcctgttgtactttgacatcaggtgtggccagtagaccccacattccatctagaacatttgtccgggagaaggggtgcccacaaggccaacatccagccgccaactttttttaccctggcagcagagcctccccagaaccccgctatcctgggaccatctcatccctgaaatttcaccaagctgagaaacccctagcagccactgctgtgcccggggccctgaagccatccctgtcccctgtagaggggatgctctcgtcctacttcccagctagataaaagagtcgctcctccagggctgaggtcgggctcccttgtcccagggcaaaccgtgagcgccacagacaaggacagtgaagcccctctgcccccatctccagctctcacacgtgtatagggacatctgccccatcagccaagggccgtctgggaccactgcctgtagccccgtgttctggaggcaagttggtgggcagcagtggtctcggggaggcatgggggtcagcctggtgtctgcgcatgcttggtctgcccgcactggctctctgagctctcgggctctggcagcgtgtctggtctcgtcgtgtggtactgttggggatggggctggaggggctggagaagcggcaggtgaggcctgtcccaggtgggcagcccaggtggggctggttcctgagtgaggtccctcttgcatgtgagacaggacgggacaggaattaggagtcgagccagtttctctcaggagagagtcactggaatggttggtgaatttttgggccccaagccaaagcgggttagtctgctgggcagcgagcaggtggcggtgttgtcaagcccatgtctgtgtgtctggtgtccgtcgtgcgctgatgcaggaggcaggcggctcatggaggtatagggacatcagtacggggctctcaggggcagatggttctaggtggagccgagacctgccttccctctgcactgggtctccgaggactcacccatcggtcccacaggcccagaccaccccacacctgctgtgtcctgccttgagtagccactgtgtgcaccctagccaggccctgggccacaggcagctaccatttggtccagtttgtggctctctcccaacttcaagctcacctttctggcaagccctcatggcaggctcacagggaaacctcagcctgtgttcccctgtgtatgccaggcctttttgagcccaagccctcagggacaggatcaggcgctgtcctggaagcctggtcccaccccacaccccgagccccaggacagacccagcttcagaccagctctacgacagccaggacattacctattgcctgcctgcctccctcgcctcgggcaaaccaagccgcaagcttgcggtccttgtttccaaaacctgaagccgttgatttttagggccaagatagcatttttgccacacgtgctggccttcccttccttgggtcacctttttacctcttctctggcgtttgagtgggacgtccaacctcacaagcctcctcgccccagggtgagcgtgtctgtctctgttgtctgcccactgaccaccaggagcaactggtgggtttgtggccggcccctctctgggattgaggccagagactcaggcgttgggatcttcctggaacaaaggggatctctctagaacaaagctcagatggggagctccaagggagagggccagggctttgggtctgtggagacattcacctggacgccttatagggcacatgccttacgctatagctctgagaatggctgtggggcagtggcttcctggggacactagccagagctcccagccccctggatgctgccaggcctccagcagccacaaggtcacactgcagctggggttcccgaggcctcgtccacggccaccccctcctcgcctccacaccccagccagacctcatcccaccatctcttggggaggggctccgagtgtctcctttctagcgtctccaccacccataaggtcccctagccccctgctcctgtcaagggacagcccctgtcaccctgcctctgagagccctgctggcctcagatagcaggagtagggccccgggtcctgcaggctggcagccctgggcaggggctctccctgtgcctgtcctgtgctctctcagctggtggctggctctgtgcgcccatcctgtccatgtacgtggcctgcgtcgtgtcctttgtctcctgtcaggagtcaccaagtgcactttctgtcctgaatgtaacgtctgggcacttcccgccttggccctggtgacaggttctcctctggggcctgttgggtgggggttcctcatccctgtggcccccaacttccctgtgatggagatagaggctgccttacccaggcttgaggagaggagatggggatggggccttgggaaggggctttcgggttgcagaggcctcccaggagcaggtggcagaaaaaaagtcatccaggattggggggcacttctggaaccccaaaataagcatcatcatcagcctcctgccgtctgggaggttccaggggcctcttgtcttccagccgggcttgggaggtgccgacttcccacctggcctcaggccgtgaccacagcaggcctctcttctgtctgcagcacacttccaccctgggcagcgtgtttggggacgcgtactatgagcagcagatggcggccaggcaggccaatgctctgtcccaccaggtgagcgggcgcccaggctgccagccggccggtgcccaggacagatgcttgctgggaccctcgctgggacccgggccttgcgagtcagagctgcacgtgctcggggggcccgtgcctgcccctcagctttgcccctcggcccccgccccgtcccatctgcgggctatggaggctgagtccccggcaggggtggcctagcgctgcctcccctggcatctttgcccacctacagagcggaggccgagggcagagggtgagggggggcaggcagcaaacgccgggccagacagggatgggaccgtggctgtggacgcggcgcctcggcatggaccgtgcacgcgggtttgccgggaggtcgtgctggctttgcgtggaggccaggatcgggggcatccagggggcttggtggcagcctggagctgctcactcatttgctcatccattcatccattcatccagccagtctctagggtggcggggaggccccaggtggcgggtggagtggggttcgtgcttggcagcctgggtgccgagcatcctgcagggacagagtccccagctgcgggcaggacagccacagcagccaagggcttggggtggccagctgggcaggcccgcggtggccctcacagcctggtgtgcctcccttcccagctggagcagttcaacatgatggagaacgccatcagctccagcagcctgtacagcccgggctccacactcaactactcgcaggcggccatgatgggcctcacgggcagccacgggagcctgccggactcgcagcaactgggatacgccagccacagtggcatccccaacatcatcctcacaggtgaggccaggccgggggcgcgtgtgcggcgccccaaggggcctcagcccgtgcggagacagccagagactgctgtcccgcagcaggagggttgacagggccggggttgtgacccaagcttgatgggggcctgaggaggccacaccccctctcccctgaatttgactcactcctgggcttcgggccaggccaggccagggagatgcctctggaccagacgtcccgtgcataggatagagacggtcactctcccctctcggcggcctcctgtctggccaagcagcccgggtaaaggtgaagcagccgggtacacggtgcccactgcccaggccactgacctgtcagctgaatgtgcaccagggtcagggacggctgtggggtgggccctgtctggtgagcccagcctgggcagccagctaacaggtcagggccgtgatgcaccgtgacaaccacgcccaagcagtctgagcacggcgcctgggctcctggggacaagccagccccgtcctgcatggcacatatcaggaagacccggctccatctagcacagaacccagaccctgtctccctgctgaagaagatgattcccttatgagtcagggctgctggattgagggtgatgcgccccctggcagtcctcactggcctcttccaggctggaagtgtccgtatttagtgctcccccactgtggcctgggctctgagtgcagaatccagcacctccttcccacccctcgggtgtaggcagcagttgacgagaaattcaagggtggacgcgccagcctcagactcaggagaagaatcagaatctgacccccgcaatggcctcaagagcccagaaagacagggcgtttcagccccatttctcagacctggaacctgagtgtaggtggaagcctaggtttgaacccgggtctttgtgggggaactgaggattccctccagccctagcagcagctgggtccccacagtcactccagcctgcttctcagtgactcgtgccgagcagccctcatggctgagggagccggggaggtccctgccctcgccaggtcatgctgacgtgcatcagtgacacagcccttggcccgaggcttctccttggtgctcctgacatctggagctgacatctagggccagactggtctctggggtccaggcactgtagggtgctgagcagcatctcatgtgctggcccctcccccagtcatgacagctggaatgtccccagacattgccagcatacccaggggacagagtcgcccggcgggcatgcctggtccgacacatggatgcgagcgatggagccagggctaagcagtgccttttgtccccaccccatcccccagtgacaggagagtccccccccagcctctctaaagaactgaccagctctctggccggggtcggcgacgtcagcttcgactccgacagccagtttcccctggacgaactcaagatcgaccccctgaccctcgacggactgcacatgctcaacgaccccgacatggttctggccgacccagccaccgaggacaccttccggatggaccgcctgtgagcgggcacgccggcaccctgccgctcagccgtcccgacggcgcctccccagcccggggacggccgtgctccgtccctcgccaacggccgagcttgtgattctgagcttgcaatgccgccaagcgccccccgccagcccgcccccggttgtccacctcccgcgaagcccaatcgcgaggccgcgagccgggccgtccacccacccgcccgcccagggctgggctgggatcggaggccgtgagcctcccgcccctgcagaccctccctgcactggctccctcgcccccagccccggggcctgagccgtcccctgtaagatgcgggaagtgtcagctcccggcgtggcgggcaggctcaggggaggggcgcgcatggtccgccagggctgtgggccgtggcgcattttccgactgtttgtccagctctcactgccttccttggttcccggtcccccagcccatccgccatccccagcccgtggtcaggtagagagtgagccccacgccgccccagggaggaggcgccagagcgcggggcagacgcaaagtgaaataaacactattttgacggctgtcttttatatttctgagcacacacagagccctggcgtccaccggggcaggcgcaaagtggacagagcatgcagggcggcggacccccccacgaccctcctcgccctgtctccatcccctcgaagccctgcctcaccgcaggcaggcccatcggtggccacctttgccgggaagtgaccggaaggccccgtgaggggtcgaacgcggaggcaggggttacctcttggggctttacaatccgtggcccctcctgtcctgcactgtggtcaccggtcctgtcatagatgctgttaatttaaggtacaggcagaggtggccaggggagtttcattgtggtttttttttccttttagtttctagttacattttggttgtagatgactcgcttaatcttttaagccaacacttgcctgagagcatgtttttatttcagaaatccaactttacctattttttaagctaactggaaatggaggccatgcgccccaaagcagcccgccacccacctgagtgtaagaagtgagtccggcttttgggtttcaccccaagttatctcaaaacaaaagggctggtcaggctgggcagggccttgtcaggagctcacggtaggcagaggtgcctctgccagggccacagaacagacttccgggaaggggccttggcttttattgagggtctctcaaagacccagcctgccagcctctcccagaggtgcctgctagtccttagagtgtgtgtgtgaagatgccatgaccagtggcagctgagacctctctgccccaagagtgtgggggactggcagggagcgagggtccccgagacgaggaccacggtcctccctgagaacctgggtggaactggcatttcatcccctctccaccctaccctctggctcctagcccacaccccctctcttgggcagcgtggtctgctggctgccccttcttggcagctcagggtcgtggcaggtggacttggagacacacagcagtgtgtgttttagtggcaggtttcaggagcacctctaagaccagggtgacagggtacttgggagctgtcctggaccctccccataccacgggccctgcaagggaggcatcagggctggctttgttttctgctgttcttggaataggaactgctgttctgatccccccaaaactgcattgcggctctcgctcgctcctgcctgccgggacagcgccttctgctgagtccgtttatttgtagtgtcatggctgctgctttcactggggtcctgggcaccctggcttctgtcctcagagctgggtttgatcctagcaaccatcccttcctctctttgcccggcaatgcctttggcatgtgtctgagcagccaagtggccactcataggagaaggctccctggtcacgttgctcctgctgccgtcttgttccaaggtgcgggggggacactgttggtctgtccaggtcaaggtccctttctcttaccatgacagaggctgggggcagacagcggggacttttttttttttttaagaaaaactacatgtacataggagagtttcattaccattagacttgtatgtaggacttaaaaaaaaatggccttaataaaattacaagcaacccgcctggatgcggttttcaaaagaaggcattgaggaccatgctaggaaacctcataccccatccgtccaacctccggcgggcgccactgcttgtcctctggtcttcggtgtggacagataggagaggagggatgcccacctcggagcatcccaggcccgtggcccattttcagcatcctgaagccagattcacagtgacattgtgttaacgtgacgaccttggtccattatggagttctttttccaataagaacctggtggaccgaggtccgagcttgccagggacagtggggcccacgcgagtacccggggcccagccaggagccagcagccaggcgtccctgtgttccagaaggattcacgcccctcctggacctgggcgggcctcccagggggtctgtatcacggccttttgtgtgtgcgtacgtgtggtttttttaaatatcactactacatattcttgaattgccaagactttctgaaacaagacagcttaagggaatcagccttttgctttgtgatgtgaaaatactgtgatttgacgagccgcttcctgaggggcaggcccacgtggggaggttgcgccgtgtacatagacccgccgtctgtgtccttggtcaggcccggatgcttggtctacactgggttagaggctgctctccccacgcacccatgtgctcatggcttctgcagaccctctgctgggtacatcggtcccctacggcgaagttcagccagggctctccctcctgagagcatggcgtccccaccttcctgtttcgccgacgtcactacccagggtggcaagtcttgcaggcagagggtgtagcccaagttcagcctctctctgtgtcctccagagaagagggttctttgccctcatcagggccctgcttgtgggttttcggctctggggaggagagtgttggcatcagtgtgtttggcctgatttcttcagggggccaagctcccgggaggacccctagccaggagggccccccatgtccatccatccctcctgctggggcttggatgtcaggcttgggggctgtgagctgggacctcgcctgagcccggtcaggtgggacaggagcctgccagaagcccatggggggccaggccgggtggcttctattttatttttttagagatggggtcttgctgtgttgcccaggctggtctcggactcctgggctcaagcagtcctccctcctcggcctcccaaagttctggggctacaggtgtgagccacttctgcccagcatcccaggcctgaacagccttggcaggacccgtccctagagggggctctggtgcctcccttaggtgggccttgagctggtttttaaccaaacatccttccaaactcgggctgcgacctgcttcctgagttttctgtatttccaaggagccctccgaccagggagaggctggtggagtaaggtccagcggtattcgggggtcctctgtcacctcgccctgaaaacagcagctcccatcaccttcactgggtcccgatggagccgtctcagaggccgaggggccctctgtgtgggggtgggacgcaggggctctcagagcaagggccacaaagccgatggcacagatgtgcccctgggcctggcccgtcacccacatgtggtgccctgggccagggcgtgcgggcgccagagccttccctacacagcctaagagcaggggcaagactcggcccctcactcaccctgggaggcctgcctgggctacatggacacctgggtctctttctacccccattcaccatggaccaggggcctccatttcctgggggctcttgcggcatgtgatttgggggtccctgggacattctcccgtcagctccacctgagccaagtgtcctgttccctgcggcccttggccttccagggtcctggccaggcaggggtcaggcaccccatactcttccgtgtggcacaggtgtccacccacccccactggccacagacaccattctccccctgggagcaggaggtggagtaagttgtacccccaggcctgggtgctggggagttcctgagggcatgggtggggcaggagtgagtgcctcgtgatcccagcctcagtttctctcttgtcactttctcaaacctgcaggtctcagggccccgggctcctcctgggcaggatggggggcaggggctgggccttggggtggtgctggctctgatgattccagagcctgtatccaccttctgggctcctggccagcaccccacccccaggagccagggacaggtggcatgtgttggggtcgggggatggcccccatctcgaagtgttctggaatttgggggcaacccttgcccagcccagccatcaagaacttctgatctcctgcccaccaggaggggacttagccatggacttggccagtaggcctggggagggagggctttggcagccaaagtccactggccctgccgtgcccctgagtaggaaactgtcccctaggggctgggtggccccactgatatatgcaaacccgccggtccgagccctgttcctgcctgtgctcctctgtgcccaggctggctctcccccaaccctagcatgtatactctgccacggacgtcccgtgggccatgattgtgggcggccgcagcgggcgggggcaggcggctcagggcacactcggccgtccctgccccatcctctggcagggctgcttttgtctttgtacctttgcatcctttgtaatgaaacgtaataaaaatccaacgttttcgtcactggctcttcctcttttttctgagcccctccctcctccctcaggggtgacacatgggcgtggcaggtgcactggcaggtgcctcaacccttccgaacacacacacacacacacacacacaccccagaccaggcaagggaaggggtccccaaagctgggacaactgggaacctgccccccagaatcctggggcggacactgtatcggggtctcagctcttccatggctggcatccaggcctgtgaccatgaggtggtgggtcgtggaggtggacccaggggcctccccaaatcccaaatcacagttggacagtccctggcaggccactggcactcagcagcagctgcagcactgaggccttggtttggggttccctggcccgaccctccctcagaggcccgtccctactgtctccatgcagcaaaaaccacagccgccactccctgcacacacactttattttgtcctctctgagcccttctcacttccccctcaggacggccaccccttggggctgggtgcagagcccccatccagccgcggtgagggtggctgtcatccggcgggtcctcaccctggtccctaggcttgccgcagctgatgggtctcatagtcctctgggatggtgtctgcagggagagggcaggcgggtgagggctgagaaggccagcagggcctgtgtgcagactccccgcccacggcccgctggccctcggctcaccattgcagcggtaacgcaggttggcccagatgatgttctcctgggagaagcagaagacccccaggcggccaccccgcatggttgtgtccaagaccacgttgctgtcggccaccagctcagggccctcatagaatcgcaccctgagggtcagacatggtgaggcctgggggacctgggccagacccttccctctcagagcttcagtggccagccctggaagatgggtacccctgactgggctgcactgggagcaagtgaggcctctgccttgggcctcagtttcctggtgtggtggacatcaagggccctggacatagttggtgctaaacagagcacctgggcttgctagcagcatggaatggaggctgagaaacagggactgggtgaggccccatttctagctggatacacactgtgtgctgtgtcctggccagggtctcgctctgtcacccaggctggagtgcagtggtgcaattactgccaccttaattcccagactcaactgacctcagcctccctagtagctgggaccatgggcacgtgccaccatgcctggcatttttttttttttttgagacagagtctcactcttgtcacccatgctggagtgcaatggcacgatctccactcactgcaacttccgcttcccgagttcaagcgattcttctgcctcagcctcctgagtagccgggatgacagggccccgccaccacacctggctaatttttgtatttttagtagagatggggtttcaacatgttggccaggctggtctcaaactccggacctcaggtgatccacccgcctcggcctcccaaagtactgggattacaggcatgagccactgcgcctggcctaatttttttcttttttgtagagacagggtcttactatgttacccaggctgcctcgaactcctgggctcaagcgatcctcccatcttggctttccaaagtgatggggttacaggtgtgagccaccacgcctggaccagcataggctcattctaactgccctgtatctttcctatcgtacagatgaggggaccagggtcacacagcccctgcctggccagggcactcccacctgggcctgtgtgtccccagcccagcccaccacagagggtggagtccccacctgatgtagcccacttggggccggtgctgcaggaaccaacgataggacttcttgtccttccaacccacgtttcgcgggtccttccacagcagccgcacctgggactctgtgtctcctgtatgccacagagcgttccgcagctgttccccggggcctgtggaagacttcacagcctgccaatacccaggaaaggtggtcagagacctcgtgggccaccggagcccccctagacaccttcctggagagacagttgggagcagcaggtggtgggcggccagggggatccggatgagagacccacaaggaagccttcttcaggggccaaatggcagcttggggataggtcacagggggcagcagtggtctgcaggttcatgagaggatttgggagtccgtggacagattcagggtctgggaggatggggggctctgcagaaggacttggaaactaaggaaaagtttagggctgtgtgagagggtttagggtccataggaagactggggggccctgagaatgtttgagaatttgtgcaaggaactgggaggatttggggactgcgggagcccagaggagggctgggacagctttgaggtccatagtatgaggctagggggctggggggctctaagggctgtaaagggttttacggagggtcatgggagggcatgaggaccgcagaggtcaggcacggacggccctggcaccttgagttggatgccaggctcggccacagcacggaaggggttcgcctgccaatacgtttgctccatctgcttccacatgaccacgtagaagctggagctgtcctggtagccaaagatgaagcccgcatagtcgtcatccgtgaccgtgttcacatggaacgtgccctcgaagtccacgccattgaaggcagtgtaacctagggatggaaagagagcagtggcctttccgaacgccagccccagcccccggaacctggcacccagaacccaaacctgccccctgggtcccgatctgcctgcagacctgcaccattcccactcgcagagcccggactcagccacgccccccatctaccattggccacgcccctccagagtccacctccacttggccccgcccttcccgagcccgcccctcctctggccccgcgccttctcctcccgggcccgcccatataaccccgcccctctgtccccgcccttcctgagcccgggccagcccccttctggccccgcccattctcagcccgggcctgccccttctctggcccctctccctgagcccgctccgtggcaggatagcgctgctccccgcttctcacccacagccaggcctgggtcgctgttcattgtctgcacgatctcccttccctgatggggtcaaagaaaggagggcctcaggctggccgtgacagccctaggcaccctgtcctcagcataggcctcactgtgggggttctagggtcccatcaccccccacgtggaccccgctcccacctggttgagcaccacccagttggggtcaatctgcgcgtcaccctccgggtccagcacgactgtctggaaggccctgaagtcggtgagcgtgacttcagcgttctccggacacacgtcgatcttgtctaccaccttgtctgcatcaaagtcgtcctggcacacgtcgcccacgccgtcccctgagaggtgggagacccctcggtgggctaaagtcagggcccgcccaccgtagaccccgcgccaggagcccccactggccccgcccccaccgcaggccccgcccccgccgtactgtccgcgtcctcctggccggggttaggcaccaggcggcagttgtcccgactgtcagggactccgtcattgtcgtcgtcgtcgtcgcaggcatcaccctggccatcgtggtctgagtcctcctgggcactgttaggcaccgtgggacagttgtcccgagagtcctgatgtccgtctccatccctagagtggataggtgggatccagagacaatgagctctccagagcgttttgtcaaaggctacccggacgcccaccccaggtggcctccttactggtcttgatcgctgtcacaagcatctcccacaaagtcgtggtccacatccgcctgcggagggcagcatgcgggggtccataatcagacagaggaaatcagaaagcctcccacccaacccagccgcacagccaaggtcctcctgaccccaaggaaacccccaccgcaggctgctcggaccgagaggtcatttctctggcagtgtaaaatgctctaagctgggctgtgggctgggtaatccaacttgcagttcacccagagggcttacccagctggagtctggcctgccctcacctgatccgggttgctcttctggggacagttgtcacaggcatcccctataccatcgccatcactgtccttctggtctgagttgggtaccctagggcagttgtcggcctggttgcggatccctgcagaaatccacgggaccagagccccaagattgggaccaggccagaatgacttcattaggatgagccagcctgaggctggcctggaacagagtcccaacttcatggaagctttttttttttttttttttttttttttttgagacagtctcattgtgtcactcaggctggagtgcagtggcatgatctcggctcactgcaacttccacctcccgggttcaaatgattctcctgcctcagcctcccgagtagctgggattacaggtgtgcgccaccacgcccagcaaatttttgtatttttagtacagacggagtttcaccatgttggtcagtctggtctcgaactcctgacctcgtgatccacctgcctcagcttcccaaagttctggaattataggcatgagccaccccgtccggcccacaggaactttaagaatgaatggtcccatccaagggaaggctagtgagggggacgggctctcactcccagggtggctcagctgggtgcccgtgtgtgccaccctgagcccctatgtccccatctgtaaagttgtcacctcccaggtcctaaaccccaggctcgaatctcttgtcctcttaattcctgcctgcggcattgacacagggaccaccttcccttccaaatatccctgcgtttttcctggccttgcagcccagcttgcatttttctggcgccccaccatggtctttggtccagggcgccctagtccagcttaccccatccggcttccaaaaccagccaagccccgccccggagccgaatcccgcccttcggtgcccgccgcctctcctcgccccccaacccccatcgagctcacggtcgccgtcgatgtcgtcgtcgcacgcatcgccccggccgtcctggtctgtgtccttttggtcgtcgttcttctgggaccggcagttgtcgcacgcatcgccccacttgtcctcgtccgtgttgcgctggtctgggttccgcaccagcgggcagttgtcctggatgacagggtgggttaagggtgagatcaggtcgagaaggcaaaggtcacactcctcagattcccaaatctccgaggacgcgtctcctcctcaaggaacctttcgcccctcctagaccacggaggccacgcccctcatccaagccacgccccatcccacttccctaggccccgctcacagctctgtcttttcttttttctttttctttttctctttctttctttctttctttctttctttctttctttctttctttctttcttttttttgagacagagtcttgctctgtcgctaggctggagtgcagtggcgcgatctcggctgactgcaacctccgcctcccgggttcaagcgattctcctgcctcagcctcctgagtagctgggattacaggcgtgcaccaccacgccccgctaatttttgtatttttagtagaggaggggtttcaccatgatggccaggatggtctccatctcttgacctcgtgatccgcccgcctcggcctcccaaagtgctgggattacaggagtgaaccaccgtgccgagccgtagatctaccttttcattggggaccccgtccccgtcggcatccggatcgcaggcgtctccgatgccatcgcggtccacatcctcctgccctgagttgggcacagtcacgcagttgtcctgggggcgggcacagaaggtgtgaggggcgcggtcatgaagtcccgccctccctcctgcccaagcccgccccgctccgcccccacccaccttacggcactggcgctccgggcagcgcagcttctcgtccgggaagccgtctaggtcagtgtcgcgaccacagaggatcccgttgccggcccagccaacggcacactgtgggagagtgtaagtgggtgccctggagtggccgccacccaaccccgcctcaagcccagcccgcccgcactcaccacgcacgaccgcgagccatcgcgctctaggacgcagtctgcatgctcgtggcactcgctgggcgagccgtcggggcagaagcgctgtgcgcgccgctggcagccggacgcctggtcgcccacgaagccgggctggcacgggccgcactggaaggagccctgcgccggagccgccggaggtcagcgcaggccgcccgccgctcgccccacctcccgcgatcctttcttcctccccagcgggccttacccgggtgttgatgcacacggagttggggacgcagttatgttgcccggtctcacactcgttgatgtccgtgcaaacctaggggaggggaactcagaggtcaccaccccacgcagacacctccggacctcccacctcctccacacttcctccgcatcctgcctctcccctccatcctgccccaaaccgatcagccctggcgcagcggacccctcctctccccacccctcccgctggaaggaggctggaagaggagtttactggtaaacaaaatggacgcccccttcccttctgctccaaaaatggggcccccacacctctcacctgcttgttggccttggcgaaagccagccccacgccctggtgggtggggccgctgtaccccggcgggcaagcctcgcagcggaaccccgggctggtgttgatacagcggactcgggggaagcaggggtgggcgttgcactgggggaggaggggccacagagggtcagagggcttcgagctgggccctgggggccgcacctcgtagtgtctcggatgtggaaagttcaagggccatatgccagtgcttggagctctgagatggaagcaattgtcgcaggggtcaggcacgactttgccttgatgacggcaagggcgcaaccgggagaggagaggagagctgttccctcatgggcgaggggaggaaggatgagggcgggcatccccagcagaggggggcaggggtcgtcggggcgtgcgtgcccggcggtggcggggggtctgggcgtgcgttccctggctgtggaagggtcgttgggactggcgatcccctgcggcgaggagggtagctggggcggaccacccctggcggtgagggagtcgtcggggcgggcgtcactagctatgtagggggttgtgggggcgggcgtcccgggtggtgacggggatggtccttgggttgggcgtccccccgcggtaaggaggtagtctggccgtgcgcccccggaggtgagaggctcttcggggcgaacactcccagtggaggaaggggtctcccgggcggcgagagattggggggcggtagagggagtcgtcagggcggtggagtgtcggggctagcgcacctcgttgacgtcggtgcagtgcgagccgttgcccgtgaagcccgcggggcaggggccgcagcgcgcgccgctctccgtctggatgcaggccacgccggggaagcagaagccgggcgcgcagtggagcaggggccgcacgctgggtaggccggtgcgtactgactgctgcatccctgcgggggggaggggggagaagcggcggggctgatcggtggctcgcccgggggcagagcctatcatggccacgccccggggctggaggcttccccttcccccccaccccccgccccggggcggcccgaaatcctgcgctgtccgcgatcccgccccagaggctgcgcgctctgaccgcggggtctccccggtctcttctctgagtctctgtcccgcttttctgccccgtggcgtctctcacttccccaaaactctctcaccgcttctgtctctttttgtctctgtttctacacaccccatcccattcccgttcgtccgtccacctctccgtcagcctccatctccttccgtctcttttcctccccagctttccctggctctctgtctctgtctctgtgtctctgtctcccgtctcttctctctcccgaccgccccgccgcgctcaccgcacgcgtcacactccatcaccgtgtttttcaggaacgtgatctccctgacctgcaggggtgggatggaatcagcggggtcccaacctctcctcatccctcgggtctcccctctctctaccccggggtccctttctacagcctcttttcgccaaggactccctacccgccgacccccttccctccccatctcctctccaccttctcgggtacttcctctctcctcgctgggaactgagacccccttccgttccctggcactccctgccccgcacccgggccccgcacctgctgccgcagcagctcccgcacgtcctgcagcgccgcgttggtttcctgcagttcccgaagcatctgcgggcccaggtctgagcctgcggcggcaggggacctggtgaggcgtcatggggccggggaatcccaccaccaactcccaccgttgcagcgaacccggacctccgaggccccactgcgctcctctagtctcggtcccgccacctgctttctgcgcccggcacgtcccctacgaacagtccgtgagccccaaacagcctggatcccgggcctctcacgggtcctacagtccgttgtggggccgtgggcacggcgcgggtgctaacgcggcttacccaacgggctctggccctgtccggacgcgccgagggcagccagggtgagcagaagaacgcaggcggtgtcggggaccatggcggtggcggggagctgggtggctgctcgctttctaccgcccacgaggcccgcggggcctatttatccccaaggcacggccggccccagggacggcccaccacagccctgcccaacgtccagcctcaaggtaaacagatggcgctggcccctgcgttcaagtccccgcccggaatgccccgcgaagtcgcccgcggctgaatccgacatggtggggaaactgagtcccggggtctgtggagagagctggtggggcagggagtcagggggtactgcccccactttcattcactgtgtgtgtgcgtctgtgtgtgtgtgtgtgtgtgtgtgtgacggggtgtggctgtatcgcatcctcttgcttcagtctcccatgtagctgggactacaagcccgcaccaccaagtccagctaatttatttttatttttatttttatttttagagaccgggtctggctatgtcctgcaggctagtagtctcaaactcccggcctcaagcgatactccccacataactgggattacaggatccagccatagcattcagctcattgattgattgattgattgagtgcttgctgtatgccaaacctgagttccagttccaaacaaggcaggctccatggccacgctctcagctcacacttcgggaaacagagtcaccagcgtctgaaaaaataggtccacccactatggatcagactgactggccctccactcctcctgaagtgcttcaaaactgggtaagttgctgggtgcggtggctcacacctgtaatcccagcactttgggaagccaaggcgggcagatcacctgaggtcaggagtttgagaccagcctggctaacatggtgaaaccccatctctactaaaagtacaaaaattacccaggcgtaattcctcccttgcacaatggaggtaataagttaataattattaattaatgattaatagtaatgatgattatgatgatgaatggaaaataggggaggggcagttgagacctgggactctcaattttcctgcctctgtccaaggaggccgcttctggccccaacgctggagggctgcaaatgactccccccaacccaactcattgctggtgttccctcccctccccatggtccctcggctggtggaggaggggacagcgttcaggatcttgccccaacccctgtccaaggggacaggcccacttggttttccaatctgcgcaatggggtgtgaggcccccatctggaggggagcaagttaaagggctctagcaaggggaggtccggggcttctgtttgtccaggctgtgccataccttccaaactgtgctccagctgctgtgggaacagcctgtaataaaaataaaagttaccgctaactggccagccacactctggagttacaaaaccccttaacctcctgcaatcagttaacactctccactcccaccttccagtactcacagcgtctattctatagacagagaaactgaggcccagagagaaaaagtgactggcctaaggccactgcccgagggcaggggtgaatctagactcagagccagatatgttttctggggagcctacagagaagtcaccgagggcttcctggaggaggtagcaaggagacagacataaaagaaaaggaggacttggatcagcagagggaaaaggtgagggcagttttggtggagggaagcatgtgaagcttggaggtggggacatttctagacacaataattatttcacaaacatcaaggactgttgtgtgtcatgtctcctgtgctgggtgatgggcacacagggtgaagaagccagacccagtctctccttcaaatggggagcccagtgggctcatggctgtgacgggacacacagacaatggtaggagtccccaggaaattgatctgtttgaaaggggatgggtcagggcgggcttctggaggaggagggaccaccaagctgaggaccggatgatgaggaggacacagccaggcagaggtagcagaaagtcattccaggtagaggaaacagcataggcaaaggccctgaggcaggaaccaacctggcccgttggatggactgacctcaaggtgacaagctcttggggctcagtgagaagcaggagatgaggctgtgtgtgaaagggcagtgctggtggtgtggggctccagtggtctcccgagggtaatggggagccacagagagtgcgtgaagagagacaggcctataagtggagtgttggtggaagcagctggtcccagccagagcatttccaatgaagcctgtcctcaatagtgcctgccctgcctgctgcctacattggggccatgagctcacctcctgttttccttggccttcagcacacctgggggccgctcctggcagcactggaattctcgggaaaaccacagctccagtggggcctgggggctggcatatgctgcacacagctaggacaggagcacatggaagccaggcccctgccacaggctggtcacagtgctggggcttggacacacgtggccttatccatggctgggccacggggagttgcagggaagggcattccaggcggagggaactacaaaggtggagttcctgagggtgtcccaagatcggacaacagaggcccggaaaggggatgtctggggtcacactcctgcctcctggatctcgccagccctgaaatcccccttctaggcagcagtcccctcctcctgtgcacaccacacttgcctcagattacagaataactcactgtaggtgtcattctgggcctttgtacctgctgttccccccacctcgtacaaactcctccatccttcaaggtccagctataatgtcccctcctccaggaagccttccctgctgatattctccagataaccttccagcctagccatgatcctcgggactgtgagtgtctgtggtttgctctgtccctccgagcctgaggggctcccacccaggggcctggactggtgtagaaaggttaggctggagggcttggtgagccgggacagcatccctatgattcgtgttcattactattttttttttttttttttgagatggagtctcacttttgtcgcccagctggagtgcgatggtgcaatctcggctcactgcaacctctgcctcctgagttcaagtgattcccctgcttcagcctcctgagtagctgggattactggcacctgccaccacgcccagctaatttttttatatttttagtagagacggggtttcaccatgttggccaggttggtctcgaacttctgacctcaggtgatccacctgcctcagcctcccaaagtgctgggattacaggcgtgagccaccgcgcctggccattactactttttataattaatgtaatgtcattactatttttttttttttttaaaatagagatgggggtcttattatgttgcccaggctagtctcgaactcctgggctcaacagatcctccttcctcggcctctcaaaaccctgggatttcagccactgcacccagccaacattatcatatgaatcctagtaacccctgccacctctgtacttgatatggcagggaagggggccacacagcctgggttcaaatattggtgagcatggccttactgtgtgacctaggacaagtcacttaacctctctgtgcttcagttttctcacccataaaatgaggatgatcactgttgagaggattgaatgagctgacccatggaaatccttcagcccagcgcccagctccagcgctactagcgtgcttattccatatgaaatttatacaccgtgggccagtgtggtggctcacacctataatcccagcactttgggaggccacagcaggtggatcacctgaggccaggagttcgagaccagtgtggccaacgtgaaactccatctctactcaaaatacaaaaattagctggacgtggtggcgcgtgcctgtaatcccagctaatcgggaggctgaggcaggagaatcacttgaaccggggaggcagaggttgcagtgagccgagatcacatcactgcactccagcctgggcgaccgagtgagaccttgtctcaaaaaaacaaaacaaaacaaaaaaacttataccctgtgcctgtcgcttatacctcagatcgttcttatttctatcttactcagagaggagaagagacagtctgaggtcacacagccagaattagaactgaggcatgcaagaccctcaagcccttcatacccgccctctctgtccttgccacagaaacagaatccagcatttcgctggcccgagcccctcattaactgggatgtcttctcggcccaggacctcctggccagagcatctggccggcgccccagccagccccacaccaggccccgtggttccaggagcccggccaggctggggaagagggacgggtgcctgcatgatggggccccggggcccttcctggcagacgtctgctcagccaggagacgtgtgggcgccccggctccctgcctcccgcccccaccgttgcctgcctttgtgaatgcagaaggaaagtatgttgtgaaggcagccgccctgccctgggcgggccgggctgtaggcccccagtctgcggaattcatcagggcggcaggggagggcagcttggcgacctctgcatcctcagcctgccttgaactgggagagacgtactggaggcatctctctagaaggaacaaaaggcaggggtgggatggggggctctgagctttgaagtccaggagacgccccccgactggccgtgtgacctttggcaggtgccacctcctctcccagtctccttttttttttttttttttttgaaacagggtcttgctctgttgcctggcctgaagtacagtgacaatcatagctcactcattgcagcctccaacttctgggctcaagtgatcctcccacctcagcctcccaaagtgctgggatcacagatgtgcaccactgcacccagccccattctccttttactcagtccctacccccattgcatcccaggctctactggatggcgataaaggaagaagacaacaataaatacagtggctacagttttcttgagcaagtgccaaatgcttgaaaccttaccactcagcctttgtgggttttctctttctgtcatcccttaagtcccagaaggcaggaatttgtcatcatgggagacagtggggcacagtgatgaaggtctcagtctctggcatcagagcctgagtttcatatcccagctctgctgtggtacatgaggcaagttgcttaacctctctgtgcctcagtttcttcttttttcctttatttcttcttcttttttttgccaccttcgaaagtttcttataatgtaaaattttacttctcaggttactatactgaagagttgcttcaggagagaaagaatttcaccagaggccgggcgtggtggctcacgtctgtaatcccagcactttgggaggccaaggagggcggatgacctgaggtcaggagttcaagaccagcctggccaacatggtgaaaccctgtctgtacaaaagtacaaaaattagccgggcatgatggcaggtgtctgtaatcccagctacttacttaggaggctgaggcgggagaattgcttgaactcaggaggcggaggttgcagtgacccgagactgcaccattgcactccagcctgggcgacagagtaagactctgtgtcaaaaaaaaaaaaaaaaaaaaaaaaaaaaaaaaaattcactaggaacagataggaatttcacaatattcaattgatactggtttctttcttttttctcttttccttccttccttccttcccttcctccttcctccctccccctctcccttccttcttccctcctccctgtctctctctcttcctctctgtctccatttctttcttgtttttgaggtaggttcccgctctgtcaccccagctggaccgcagtggtacaaacacagctcactgtagctcaaactcttgggctcaagccgtcctcacacctcagcctcctgattagctggggccaaaggcatgtgccaccacacctggctaattttttttattttgtagagacagggtcttgctctgttgcccaggctgctctctaactcctgggctccagtgtcccttccatcttagcctccagggtagctggaattacaggcataacacctatatttaatgaaggtttcatgcagtcaaataaactagtgtctgtgttctgaggggaggagagtgccttcagggctaactgtagaagctttgttctctccttcagtctctctgtctaatgaagtgaaaatggaaatgtgtaaagttttacgcaaggtaacggtagcaggaaaaaccaaggtgaatataagtatgagaagaatcctgacctcttagcgtcagtgtaagaattgaatgaattagcgcccagaaagttcacagcccttgcttgggaggcggaagtgggaggatcgcttgaacctaggagttcaaaaccagcctgggcaatatagcaagaccctgtctctaaaacaaaacaaacaaacaaaaaaaaaatttaaaattagccaggcatggtggtatgtgcctgtagtcccagctactcaggaggctaaggtgggaggatggcttgagcccagaagtttgaagctgtaatgagctatgattgtaccactgtaccccagcctgggtaacagagtaagacctcgtctcaagaaaaagaaaggcccaggcgtggtggctcacgcctgtcatcccaccccagcctgggtaacagagtaagaccctgtctcaagaaaaggaaaggcccaggcgtggtggctcaagcctgtcatcccagcactttgggaggctgaggcaggtggatcacttgaggtcaggagttagagaccagcctaagcaacatggtgaaaccccatctctactgaaaatacaaaaattagccaggcatggtggtgcatgcctataatcccagctactcaggaggctgaggcacgagcgttgcctgagcccaggaggcagaggctgcactgagctgagatcatgccactctcactccagcctggggtgacagagtaagacagagtaagactctgtctcaaaaaaaaaagaaaaaaaaaaaaggaaaagaaagagctgagccctcaatcaatgtcagctattaacatccccattttacaggttggcaaactgaggctcagcaagtctgtcctgtctcctcaatttggtcactggatgctcagagtgggaagtcacctcctaccgctgcctaaggctccaggagagagtctcccaaccaggcttctgcagttcccgctggagaaggtagggtgggctgtcagcagagaaagtggagagtgcagggaccagagcactactgcagttcctcagtacccctcgtgcccctcccagcccctacctgggctcattaacaggaggcccttgttcaggggagtgatggatggcgtgggaggccgagggcggggtgtgtttacccaccggcggctgcagacaggagcccaggccagggccgggccagtaggggagggaggctcccaggtagggaggagcccagccccaatactgctgcacggaaaggggccagctgggccccttctggaaacagaggccaagggtcagggaggccattctgctggggaaattggtgccgagagttgaacaagtgaacaggtgccagcagagcagagccccaggcagagggcacagcaggggcaaaggcccagaggtgggtatgtgcttgatgtgttggaggttccgcgaggcgtcaggagtggctgcagcaagcggggaggggaaatggaggaaatcttccggctgtgagccatgtttaggctccatgggcgtgtccattcccacatctttctgcacgccaggcccttacctgggctgtgaccgctccctggtgccctgtctgctttcacatggctcattcctcaccccggctggcttagaggctcccgctggccttcacaggcccttggtgtgctccatcagagctgtgaccatgctgtatgggcactgccaggttacacgggtcatggggctgcctcctccatcagactgagctccaccatcttgttcccctctgtgttccctgcatatacacatgatggaatactccaataatggatggacagatggatgtataagtggatggatggatgagtggatggatggatggataagtggatggatggatggatggataaatgagtggatggatggatggataagtggatggatggatggatggatggataaatgaatggatgtatggaggatggatggataagtggatggatggatggatggatggatggataagtgcatggatggatggatgggtaagtggatggatggatgggtaagtggatggatgaatggatggacaagtggatggatggatggatggatggatggatggataaatggatggatggatgaatggataagtggatggatggatggatggatggataggcaaatggataaataagtgaatggattgattaatggatggatggatgatgtataagtggatggatagatggatggataagtggatggctggatagacagatggataggtggatgggtgcaaagataatgaattgatgaatagatggatgaatgatgtataagtgaatggatggataggtagatggatgggtgaatggatggatggataagtgaatggatggataaatgaatggataaggagatatattgtatggatgaatgaataagtgaataaataatggataaatggatacatttatacatgtggatggataatgtataaatggatggataaacagatgaatggatgcataagtggatgtataaatgaatgaatgaatgggtggatggatagataagtgggtatatagatgaataagtggatggatggatgagtaagtggataaatggatggatggataggtggataggcagctgaatggatggatgatgtagaagtggatggatggatggatggatggatggatggacagataagtagatggatggatagataagtggatggatggataagtggatgaatgggtggatggatagatggatggatggatgatggagtaaagaaaagctacaagaccacaaaacaaggatccacaggactaagaaatgacagaatcacatcactggttaatggagcaactgaactgtggagtcctagggccacgggaccacagagttagagatccacgcagtccagtcaacagaagcacagaaccgaagggtagttggaagctataggaccccagtgggggcagagacaagccattggggcatcccacatccacggtgccaccaggatagagtctcagagttgaccccaacagaaccaccctctggccacaccctcacctctcagctctccaaggagcctcccaggggccactgaagccacagggtgctttttcccccaatctgtggagcagccttgggggacaggaccatgccatcgccaatgcctgcagccagtcagcctccaaacactcagtgagtcccggcaccagggccaagtgaggctgtccaagtaccaggaaacactgccagcctctggccaggctcctctggacgccgagtgctctgcagccaggggcaaaggaatcaacgggtaacgtttacatccatgtcccttccaaagccagcagcaacatagcatggaggggaggccgtgccccagctgcgtcccctccgggccacggtgcactgactagctgcccgctccatcgccaggagtcacagctcagctcgaatttctcgacacatccacgtattaatgagctctcccaagacagcacccgtttgcccagcagaacttgcacctgatgcccagaacaaccagcccatttgagatgggggaaactgaggcccttgtctcagaggtgagcccaggaacacagcaggctggagctgagtctcaatcccaagcctgcaggatgctaaacctgaacttatcatcacccagttgggctgcctctcaggccccagccccttgtcctgggacccccccacttccccaccaggtgtttgcttccaaatgtggtgcattgcagaatgccaagagcacgggctgcagcagtttcttcccttccatgggctcagaatatctagctcacagggctgtggtggagaaaaactgtggtcatagcacagaaaggggacctgattgctggcctgataggagccttgcccacaccgtttccccctcccttcttcttcttcttctttttcttcttcttcttcttcttctttttttttttttttttgagatggagtctctctctgttgcccaagctggagtgcagtggcatgatctcagctcactgcaacctctgcctctgggttcaagagattctcctgcctcagcctcccaagtagctgggactacaggcatgagccaccgtggctggctaatttgtgtatttttagtagagacatggttttgccatgttggccaggctggtctcgaactcctgatctcaggtaatccgcccacctcagccttccaaagtggtgggattacaggcctgagccaccgccactagcctttttttttttttttccgctaggtttcgcttgtgtgattacctcattccatcttacatatgaaaaagtagaaggcaagagagtgaggttctaatcctcccgatacccaccctggcagcttcagggagggtttctcgcatctgcagtgtagtaaaaacatggcattgctgggcaccgtggctcacacctgtaatcccagcactttgggaggctgaagcgggaggatctcctgagcccagcagttccagactggcctgggcaacatattgagacctcatctctacaaacaagcaacaacaacaaaaaggctggagtgcggtggcacaatctcagctcactgcaacctccacctccccgctcaagtgattcacttgcctcagcctcccttgtagctgggattacaggttcttgccaccacagcaggctaatttctgtatttttagtagagacggggtttcaccatgttgcccaggccggtcttgaatttcagacctcaggtgatccgcctgcctcggcctcccaaagcgctcggattccaggcgtgagccactgcccggtctgcctgccctttctgaatagcaaggatggacccctgaagtgccaggctgaaattccgccagctcactgagtggggaaacaccctctccctgacgaactcagcaaagatctcaaggctaactctcataggctcagccctgaaccaatcactgcagtcggtgggtggagggctttgattggctgggccaggagcctgagtcccctctggaggttggaggggcaggggccaaaggaggatggtgtcagtaactcgtggtgcaggcaaacttgatggaaactgaatccccacccagactcttgccttagtgggtctctggcaccacgggctactctgagtggctttttctgggggtagggggagggacggaatctcgctctgtcctccaggctggagtgcggtggcgcaatctcggctcgttgcaacctcggcctcacgggttcaagcattctcctgcctcagcctcccaagtagctgggattacaggcgcccactacaacaccctaatttttgtatttttagtagagatggggtttcaccatgttggccaggctggtctcaaactccttacttcagatgatccgccctcctcggcctcccaaaatgttgggattacaggtgtgagccaccgtgcctggcctgagtagctttaacggggtgaccctggccatgtgccaagccccatcccctgtctctacctccggctgctgtatttgaggccccttcttactgccctctgcttgcaggaaggtgggttcttccttactctgctggcctcccgacctcccctgggtaccaagccaccttaagcatcacaaggaaacaggcattacctggaagagtccccaccaccagtttctttccaaattgctgctggtgggccaaggtgcggaggctcatgcctgtaatcccatcactttgggaggccaaggtgggtgtatcacctgaggtcaggagttcgagaccagcctggccaacttggtgaaaccccgtctctactaaaactacaaaaattagcggggcgtggtggtgcctgcctataatcccagctactcagggggctgaggtgggaggatcacctgagcctggggaggcagaggttgcagtgagctatgatcgtgccactgtactccagcctgggtggcagagtgagatcctgtcacaaaaacaacagcaacaacaacaacaaaaattaaggaagggaattccaggcagagaggtgagcttgtgcaaaggccctggggtaggaagtaattttcttgttggaggaggtgaggaggccgatgtgactggagcagagtgagggaggaggggggagatgggttagagagatgggccaaggtgggatcacatgggggccttgcaagctgcagcaaggaggtgggttttattctgagagcaatagggagccatggagagtgtgtgagcaggggaggaacatgatttatgattttaagccatctcttgtggctgcaatggggaagaggccaggcaatgtcaaggcaagagctggtggggccagggccagggcacggccacagggtggggaggagaggttagatttgtttgttttgaagcctgagaggactagagctactgatgagcttgggaaggaagggagggaggagtctcagacgcgcccagatcttgaacccatcacaaggtggttggtagggttgttgcccgacacaggaagacttagcagaaaaccatgaaccccaccttggccatgttgttgctgaggtgtctggtctgggctggccaggctccagatggaaccgtggaccttgtgggcaaagagtggcctgtgacttccaggcctgggctgtgtgcgttgcagggagatgggcaggggtctctggctgcgtccttgatccccatcctttgtgcaaacaggtggggtggggcagggggaacccatgttttccccatcccgggtccttttgttccagttggaagccacgaccaattcgaaaagtccagatgtggagttggacgcaacccttggaccgtgcggtctggggaggccagtggcccgtcatccaacaggtcaggcctccatgtggcctcgctggctgtggcccggctggggctggggggcagaacggctttgatttcgagtctctggctgaatctgcaaaggttaaaaaaataatcaccagcaccaaggcgttgccccttcaagacgtcaatcccaacaccaggcggaaaaaacaggccctggggcccctgccagcccacaggcctgagacctgcagaggggcctgatcagaaggccaaaaagctgggtccccacatctctccgggcacaaggggagactcggcttcccgtctggaacacagggcattgctgtagaagcgcatccacgttcaaggtcaagtgcagcatctacctgcctgccaagccctggcccaggcagtggggacccatgaggcgagtcaaggttggccccggtctgtagggctcccaggccagagatggggtttccccatgctggtcatgctggtcttgaactcctgacctcaagtgatccacccacctttgcctcccaagtgctgggattatgggtgtgagccattgcgcccagccccttccttcatatttacataaaatacccttctgtgacccaggacttggcttaaatgtcaacacctcaggagacctttcccaacccatgggcaaaaatacctacacccaggtatttctttcagacacttctcactcttggaaatgatcttctcggctacattttcatgaggttgggaacgtggtttatccgcagtttgtgccattgtacctggcatatactaggtgagattgtctccttggggacaaaggaggatgctggctatcacaacaaagtttcacaaacatataccctctgagacccccagacctcccccagcagtgccccaggatttacaaccagaactttatttatttatttatttatgagctggagtctcgctctgtcgcccaggctgaagtgcagtggtgcaatcccggctcactgcagcctcgaccccctgggcttgggtgatc

SEQ ID NO: 280 - DNA, 140167 bp, Homo sapiens
  Genbank Accession No. AC004010
aagctttggcgccaaatcgggaacacttcaggatccattgagatgatctttgcagagctcacactggtgcagccagagggaggatcctgatttagtagtttctacttcaggtgaggacacgagacacaggtcaagcatccagtgtggcaacgcagttagtttatgtgtgaagtgagtgctggcaggtgctcaggcatgaagcccagctactgagggagggattccactgctatgcagcccagactgcccccatggccaagggcagccagcaggttataattttgaggctttttacaatggcagatttttgaatcacttatttttttctctcttaaaacaatgcatcaagttgaggggctttttgctcattgccacagccttgagaaactcctgttgccgattagttttattttggggcttctctttgctcagagttatctagccctgcaggtggatttgatgagctttactccagggttgaaaggagactagtatttgtgccttatcatttgttaaagcccacctaatgtgggagccgctcagtagccaatcaatatcctggggaaaaaaagccttgtaattggagtctgaagacctagatctaagccctaagctctacgaagtattagctatgtcattaaggcaagtgattaaacctctctgaaactcagtttcctcatatgtcgaaatggtccttggttatatgaacagagagattgccccaaactagcagcagttttaagagagatacccatgagtggagggaggagggatagcattaggagatatacctaatgtaaatgatgagttaatgggcgcagcacaccaacatggcacatgtatacatatgtaacaaacctgcacattgtgcatacgtaccctggaatgtaaagtataataaaaatgaataaattaataaaaattttaaaaagagagattttcgctatctggctaataataaatgggacatgagcagcagctttaagccctcattgtcatttttggaagagaagttgtccaaactttaatagcttttccaacaggtatacaacagcttatctcccttaattatttaagaaaatattttgcaactaactttcctggaggggttggtaaaaattacgctatatgacatgataaatctcataggagtgtccttgatttatttggtcaccgtgccagacattaagctagatgctgaggacactggcactgtcttcaaagactttacagccttgaaagggagagaggcaactacatataaaactgcaatgaagtataataaaactgtgatagactcttccatagggtgccaagagaggcaaacagataatacatacctcctgttgaatgttcacgatcccacctccgaagtagctttgcaaaaaattgaacttgaatttcacaagccagaagaagtggctcatgcctataatcctagctactcaggaggctgaggtgagagggtcgcttgaggccagaagttcaagaccaccctgggcaacatagcaagacttcctctccctggcccctctctaaaagaattttaaaagtcagctaggcatgaatccactccagcctgggcaacagagtgaaatactgcctgtaaagaaaaaataaagcaagaacaagtaactggggcctcacaaatttggatgaagaggaaaacagctgtgagatttaaatgtaaaaataagccacaatcacacagctatatagttgaagaaggagtattttaataatctttggacaactgttgagtatccttcttcgacattacaacaaaatttaagtgattttcttaaaaattagttgtaatatgggatatgaaaccatacgaatgaatattttatacactttgaactgcgttggctatctttactttttaaaatttgtgtacacttatggatactttttaaaatttgtatacatttatgagtacaagtataattttgttatatattgcatagtgatgaagtcaaggcatttggtgtacacatcactgaagtaatgtacatggtacccattaagtaatttctcatcatccacctccttcccatgcccctcaccctttagatcctccactaacattccactctctacttccaagtgcacacattattcagctccctcttataagttagaatatgcagtacttgtctttctgtgtctgcgttgcttcacttaagaaaatggcctctggttgcatccacattgctgcaaaagacatgatttcattctcttttatgtttatataccacattttctttatccaatagtctactggtggacacttaggttgattctatatctttgctattgtgaatagtgctgcaataaatatacaagtgcaggtgcctttttaatataatgatttattttcctttaggtaggtacccagtagtaggatcgttagatagtatggttgttctatttttagttccttgagaaatcttcataccattttccattgaggttgtactaatttacatttcatcaacagtgtataaatgttcccatttctctgcatccttgcattgggctatctttaaaataaaaacatgaaagtactaaaaaaacaaataaatactttgataaatttagggaagaacattccaaacatgacaattaaaatggaacccttttaaatatgaggaaacactttaaacaagagacaaataaaatatcagaaaaaaaattgcagcatatgtggcaaaacagttgacattctctgtacaataaaccattacaaattaatgcagaagaaaatacacattcaaatagaaacacagataaaggatatgactgggcaactgaccaaagaaagaattaaaatggcaaataaacattgaaaatttttcaaattgaataatattctatgaaatacaagttgaaactatgagctaccactttttactcagaataaacaacaggtgaaaaggaatgacaatagtgtgacggtgtggatgtggaaaagtaagaactgtcatatactcttttggggactatattagtttcctattgccactgtgacaatttacccacaacttcatgacttaaagcaacacaaatttattatcttacagttccgaagtcagaagtctaaaatggataagccaggctgtttcttctggaggctccagaggagaatccatttccttaccttctccagcatttagagtcggctctgattcttggctcctgacccctcctttatcactccaacctgtttccctctgactctgaccctcctgcctcccttttttaagaacccttgtgactacactgggcccacccagatagtatgggatagtctccccatctcaaaatccctaacgtaatcatattttcaaagttccttttataacataaggtaacatattcacaggttctggggattcagatgtggacatctttggagaagggggtttattattcagcctgtcatgggagtaaactggtataaactttctggaggaaaatttgacaatatgtatcaacatccttataaggtacatatctttgatccacttattcaacttcagggaatttattctatcagtcaaacaagtgcacaaagaataggacttgtctgcagcattgttttaatagaaaaaacttggaaatgttctaaataaaaagaaaaaaaatttttttttgagccaaggtcttgctctgtcacccatgctggagtgcagttacatgatcatggcttgctgcagctttgatctcctgagttcaagcaattctccttgcctcagcctccagagtagctgaaactgcaggtgagcaccatcatgtccagttgttttaattttttgtagagacggggtctcactatgttgctagtgactaggctggtctcgaactcctaggctcaagtaatctgcccaccttggcctcccaaagtgctgggattacagatgtgagccactgtactcagcccaaagcaaaattttggttaaatatattatacttcattaaaataatagaatatcatatagccattactaatgattttccatatttgttgatatggaaactctccattgttaaatgaaagttccaggtagcaaaagagtttacgtagtatgattccattctgataaatatcaaaatttaaatctaaatatatattaatttaaatctaattaattaatttaaatctaaatatcagaatttaaatctaaatgtagatttgtgtagatttgtgcatatatatatatatattgcataataaataagcaaggctatgcacaaaacttccagtgcaaaatattgctgagtgaaatattgctgagtgacttttcctttctcttgtggaaattgtgagaattgactaggaatatgtgagaagatgaaggtttagccgagttcacaggccatgaatctgcagtgaagagcaagcgaaagcaagatcctggaagatactggcaagtggccggatcacagaatccaggttagaaaggggggaaaaaaaggtcaagagaggtctgacaaatcaggagaaaatgaatggaataacgaaatggaagaatctttctaaagaacataatctcaaattccctgctgctcactttttgtaaaaattaagaaatattcaccaaaaaaaaaaaagtcaggagaatatgaagccactcattttacttctagaagtttttcttacagaaaatcaatcaaggagagagaattgtgtattaatttaattgtttggcctttagaatcatgttccttagagggcatcggtgcgacggcttcaccattctgcacatccacctgagttttaaaacacggtttctactaaacatctggtatcttgtatacaggggatgaatgtggtcttgtttccttctttagctgctggaaaccttagagcaaaaaataaggccacttttgtaactgtgtctgactcagcagcataacttttccgttgtcttccatgtgctatcctgtttttatttttcctttcccttgattgctctctatacatacatttttgagaagttgtttttctttatttttcaaactaattcattcaatactctcctccaggtagagtttataattgtttgtagttgagaaaattggactagaatgaagccttgtggaatccaagaagaattcgttattctttagctgctttcatctccaactgtgttaggcatcctcctaagatggtccccaagatggcagacccctggaatcatctgtacaatttcctctcttttcacaggtaagggattttataaacataataagatttctttcctgtaattgggttacattgaataacaaaggtgaagggattacacagatgtaatgaaggtccctactcacttggctctgagttaatcaaaagggagattatcctaagtgggcctgacctaatcaggtgagctcttgataagagggtgctggccttccctgagagattcaaagcagcacaaatgctctcctgttggatttgtagaaacataatgctatgctgtgaaaagggccacttagggctgcagtcctccagctataagaactgaattctgctgttggggctcagaaaacaatatcccagaatgaaacctcaaacgcagcctggaaagaaaaagttcttctctgacctcctacccttctgtctctcagtcccattctcccctgaggctatccatagaaaccagaactccttttccccaaaggcagccataaacctaaaaatgttactctaactttccctctgccctgtctacgtaaaaactggccataaagaaattatctgacttaccttgtttaactgtggatgataagacccccattccagagagggttctgccctatacccagaaggaaggaatactgcacagagaagccaagaagaatctagacagacaggccttactgagtttcccattcagtttattagcatttgattgtaccttttttgtccaatcccatttcgacacggctgtccataatttgctgaacctaggcataaaaatggaaaattgcccccattctgaaggctcccgtgtttacttacatgttaaataaatttgtatgccttttcttctgtaaataggcttttatgagttgatttttcagcgaaccttcaaggggctaaggggaacattacccttggccactatactgccaacaacctatgagcctggaagaggatcccaagtctcagatgaaaccaggacctcagccaacaccttgatttcagcctcatgagatcctaagcagagggtacagtaaagccacatatggtgcctaaccaaaaaaactatgagataataaagatgtgttttggaagctgctaaactggtgttgatttgttacatagcaattaaaaactaatatacaaacactacggtatttgttttcttcattaattaaacataacgtatcctcacttctgtatccatcagtaaggcaaggttctgtgataaagacctgcctgcattgtacgtctgtatggttcctttccctatcccaaatcttagatgcatattttgattgatgatgattgtccttgatctaagagatgatgtgatatcctgctaccccattcttcaaccccctcagacactgggatcattgtagaatgattcataacattccctgggaccccaacacatggtgttctaacgtttctcagtctacaatacagtagtccctaaatcacatgacaacttttcctattgtagaaaaagtgcacgcagaggcgatgtggtggctgatctgcggcagcagatgaggtcctgtattctgctcctgccccacactgaccagatgcccatttagacaaggtttcccctgcttccactcatagacacagttatctctcagactcaaggtggcctccaagtccttagcatccacttcttgtagaagcagtgccttcccctttgcaggccagtgactttttttagattctcaaacacaaagtgactgatcattcaccttttccttggcctgattgactataggaataccagaatggtggtggagaggggtaaggagttggtgtaatgtttcacacctcaaaggtattcaccaacactaggtcacaagctctatctctctctctttctcacacacacacacacacacacacacacacattctctggaaggtcatctcatcacagatttacagccctgtaatcacccttgaatgaacctcttcgggaggtacttgggaaagcaaggagagaagacagcttgctcattctgtcacatgcattattggatttgggcaattattttaatccccatagtagaaacttgctcatatttccatattggtacaaactcttcagtctacttaagtggatatccaaggaactatttaatttccaatttaatagtattatggggaaaaaagacaataacaaaacaaatttgagtcaaataaatggtctcatatgaatggcatctgcaataccttcaacaactaggcagaagatatatgatgctatcatagttttcttttaaaaaatcaccaaagcagtttcatctttaacaccctacctaagatttctaaatgatagcctatcaaattatatccccattaggtatataatagctcctttcttaccttagataaatatattcttgtttcacaagtttttttaaaaggctttgcttgaaattaaaatctgaccaacaaactagagcagagataattcctcagtgtcaataggcttccttggaaacttacccacatataaccaatgcagcttcactcgtgtatagaatatactgacagagaaaaagaaaatacagatgacattacaatcataaacaccctatttcctgtttttaaaaaaacatgtcttcagaagtgctttttttacaaaaatttattttaagttctgggatacacgtgcagaatgtgcagatttgttccataggtatacatgtgccatggtggtttgctgcacccatcaacctgtcatctaggttttaagccacgcatagattaggtgtttgtcctaatgctctccctcccctttcccccaacccccgacaggccccagtgtgtgatgttctcctccctgtgttcatatgttctcattgttcaactcccacttctgagtgagaacatgtggtgtttggttttctgtttctgtgttagtttgctgagaatgatggcttccagcttcatccatgtcccttcaaaggacatgaactcatccttttttatggctgcatagtattccatggtgtgcatgtgccacattttcgttatccaatctgtcattgacgggcatttgggttggttccaggtctttgctattgtaaatagtgctgcaataaaaatacatgcacatgtgtctttatagtagagtaatttatattcctttgggtatataccaagtaatgggattgctgggtcaaatggtatttctggttctatatccttggggaatcgccacactgtcttccacaatggttgaactaatttacactcccaccaacagtgtaaaagtgttcctatttctccacagcctcgctagcagctgttgtttcctgactttttaataatcaccattctaactggcatgagatggtatctcattgtggttttgatttgcatttctctaatgaccagtgatgatgagcttttttcatttgtttgttggccacataaatgtcttcttttgagaagtgcctgttcatatccttcacccaatttttgatgggatttctcatttgttctttttttcctgtaaatttgtttaagttccttgtagattctggatattagacctttatcagttgggtagactgcaaaaattttctcccattctgtaggttgcctgttcactttaatgatagtttcttttgctgtgcagaagctctttagtttatttagatcccatttgttaattttggcttttgtcacaattgctttttgtgttttagtcatgaagtctttccccatgcctatgtcctaaatggtattgcctaggttttcttctagggtttttatggttttgggttttacaattaattctttaatccatcctgagttaatttttgtataaggtgtaaggaaggggtccaggttcagttttctgcatatgactagccagttttccaaacaccatttattaaataaggaatactttccccattgcttgtttttgtcaggttcgccgaagattggatggttgtagatgtgtggtgttatttctgaggtctctgttctgttccattgttctatatatctgtgttggtaccagtaccatgctgttttggctactgtagccttgtagtatagcatgaggtcaggtagcatgatgcctccagctttgttatttttgcttaggattgtcttggctaaactgactctttttcggctccatatgaaatttaaagtagcttttttctaattctgcaaagaaagtcgatggtagcttgatgggaatagcattgaatctataaattactttgagcagtatggccattttcatgatattgattctttctatccatgaatatggaatttttttccatttgtttgtgtgctctcttatttccttgagcagtgatttgtagttctccttgaaaaggtcactcatgtcccttgtaagttgtattcctacatattatattctctttgtagcaattttgacgtgagttcactcaaaatttggctctctgcttgtctactattggtgtataggaatgcttgtcatttttgcacattgattttttatcctgagactttgctaaagttgcttatcagcttaaggagttttggggctgagacaatagggttttctaaatatactatcatgtcatctgcaaagagagacaatttgacttcctgtcttcctgtttgaatacgctttatttctttctcttgcctgattgccctggccagaacttccaatattatgttgaataagagtggtgagagagggcatccttgtcttctgctggttttcaaagggaatgcttccagcttttgcccattcagtatgatataggctgtgggtttgtcataaatagctcttattattttgagatatgttccatcgatacttagtttattgagagtttttagcatgaagggatgttgaatttcatcaaaggccttttctgcatctatgagataatcttgtggtttttgtcattggttctgtttatgtgatgcattatgtttactgattagcatatgttgaaccagccttgcatctcagggatgaagccgacttgatcgtggtggataagctttttgatgtgctgctcgattcagtttgccagtattttactgaggattttcacatcaatgttcatcagggatattggcctgaaattttctttttttgttgcatctctgccaggttttggtatcaggatgacgctggcctcataaaatgagttagggaggaatctctctttttctattgtttggaatagtttcagaaggaatggtacaagctcctcttagtacctctggtagaatttggctatgaatccgtctggtactgggcttttttgttgttgttggtggtggtggtggaggtggtaggctattaattactgcctcaatttcagaacttgttactgatctattcaaagattcaacttcttcctgatttagtctttggaggttgtgtgtgtccaggaatttatctatttcctctagattttctagtttatttgcacataggtgtttatagtattctctgatggtagtttgtatttctgtggcatcagtggtgatatcccctttatcattttttattgtgtatatttgattcttctctcttttcttctttattagtctagctagcagtctaactattttgttaatcttttcaaaaccccagctcctggattcattgattttttagaagggtttttgtgtctctatctccttcagttctgctctgatcttagttatttcttgtactctgctagcttttgaatttgtttgctcttgcttctctagttcttttaattgtgatgttacggtgtcaatttcagttctttccagctttctgatgtgggcatttagtgctatatatttcccccttaacactggtttagctgtgtcccagagattctggtacattgtctctttgttctcattagtttcagaaaacttctttatttctgtcttaattttgttatttacccagtagtcattcaggagcaagttgtttcaatttccatgtagttgtgcagttttgactgagtttcttaatcctgagttctaatttgattgcactgtggtctgagagactgttatgatttccattcttttgcatttgctaaggagtgttttacttccaattatgtggtcaattttataaagtgctatgtggcactaagaaaaatgtatattgtgttgatttggggtggagagttctgtagatgtctattaggtccacttggtccagagctgagtttgagtcctgaatatccttgttaatttttcttcattaattaattgatctgttcattgatctaatattgacagtggggtgttaaagtcccccattacattacaactgtgtgggagtataagtctctttgtaggcctctaagaacttgttttatgaaactaggtgctcctgtattgggtgcatatatatttaggatagttagctcttcttgttgcattgatccctttaccattatgtaatgccctgaaagtgctttttaaaaaaaaaaaaaaaaaaaaaaaaaaacaaacaaaaaccaggtaaataaggacgtatacacatataaacactaaagcattagcgcaagacttcttaatgtgtgacctttaatttatgtctttctatctagcggaatgagctccaaccttgatagctgaggactaaagcaagaaccaggacagagggaaaaaaaagattttgtgtagcacatagaaggttgtgagagtttctcccaatagaaaagagttcctgctggaattgggatctatcctttcagagtgatcagtattttctgagtctaggataagagctggaattttcctggaggtagatcttccttttgttctagaaggaaccactctgtgagccagtttagtcatagatctataaggctgtttgttgtctgggggaaagtctcatggaaagccccaaaccaataaaatgatattaatgcagatgtttcagagtgacatgttgaacacattttttagtgaagttccttggcatgcaatttttggcaggactaagcctttgggaaaccagaaccaccatgaagctgcttacacattgggccctcctccaggacacctggctaagggcagagaaatcagctagtgctctgcttaccaatccatgagttgctagccttcccagagaaagggcatctttttataatttttacataagctaaggtttctgagagacattatacataccgctaggctatacaagaagaatctgggatctgatctgatctttactgctcactagacaaagactatggaaagagaataaactgggattggtttagaagtacctgaactgtttgattttgttcagtagagagttaaccctgaataacccagacttaaggaaatatatagtcaactgttgagagtgtcttatctaagcagtgggtgagagagaaggagtgggcagaccatatgctatagtggagagtgggagttcccctaaatgaatggatgttcctactgcagcggatcatcctggaataggaaaggaaacatatctaggactgcgaaaggaggctctaggtttgtgaaaaactgaacccagatttcaggtaaggagacaccagcaaagatccatacaagatggcagcaatttgaagatcaaggagagagaaggtcaccatgggatgaacctgggaatggcacaaatagtggacttaaaaatagtcatagatgctgggcgcggtggctcacgcttgtaatcccagcactttgggaggccgaggcgggcggatcacgaggtcaggagatcgagaccatcctggctaacagggtgaaaccccgtctctactaaaaaaaaaatacaaaaaaattagccgggcgtgatggtgggcgcctgtagtcctagctactcgggaggctgaggcaggagaatggcgtgaacccgggaggcggagcttgcagtgagccgagattgcgccactgcactcccgcctgggccacagagcgagactccatctcaaaaaaaaaaaaaaaaaaaaaaaaatagtcatagatattttttgcctacattacaatccattcagtaatctccaagccttcaatgaagttttcttaaaaaccccgactttcatagctatgttttggagaaaaaaaaaagatgtcgggaaacatatgtgcagtgccattgtaagggagaagccactgcaacctgaagaagccagcatctgagagtggagaagcagtttggacccaggtgactggctaaagtggcaaatgcagggaaacattcgcggaatagaagaattaattgaggactctcagaaatactcggtgagggcccactccagtggctcacacctgtaatcccagcactttaggaggccaaggtgggtgaattgcttgagctcagggcaacacagcaaaatcctatctctacaaaaaatacaaaaattaggcacgatagctcacatctgtagtctcagctacttgggaagctgaggtgggagaatcactcaagcctgggagatggaggttgcagtgagccaagactgtgctactatactccaggttgggtgacagagcaagatcctgtgagaaagaaaagggaagggaagggaagggaaaggaaagggaaagggaaagggaaagggaaagggaagggaaagggaagggaagggaagggaaaggaaaggaaaggaagaaagaagggaagggaagggaagagggagggagggaggaaggaaagagggagggaaggaaggaatcaggaaggaagaaagaagggagggagagagggagggaggaggaagggagggaggaaggaaggaaggaaagaaggaaggaaggaacaagggagggaaggaaggaaggaacaaggaagggagggaggaaggaaggaaggagaaaaggagataattgatatgtttaaatataaaaaaatacttcgcaagaggaaccagataacctggactaaaaacaattgttcaagtaggaacttgaattaaattaattggtattaaaggaaatattgatcctggaaggagggctaagtcatggggacatgtgagatactgaggaagaatgaatggctagaagggaaaggaatgtggtattgctgactctgaagtaccacagaaaattttctcttagcccttaaaaggaaaagctgaaagttccagtcttataaagggaaaaacacattgctagttgtaatctcattttcatttcctctctgttatgactgaaatattgattaattataaatactgatgcagaagaatcaatattcagattcaataattaactatttaaaagttaaagtatattcttctaaaacacatgcaaagaccaaaaaaattcaggttttgtacccttaccttttcctttttctttcttactttatttttttattttttatttttttgaggtagggtcttgctctgtcacccagactggagtgcagtggtgagatcacaccctacttcagtcttgacctcctgagctgaaagtgatcctcccacctcagcctcccaagtagttgggaccacaggtgtacaccaccatgcccagctaatttatttttactgttggagagataaagtcttgctatgttgctcaggctggtctcaaactcctggactcaagcaatcttacagcctcggcttcccaaagtgctgggagtacaggcatgagccaccacacctggcctgtactcttttctttatcactcttttggtattgactaggtatctacccattttcctgtcttccggtcatctcaactcagatgcctacaaaaagccaaaactgcctacagttttaaaaataaaattaaaattctacttcagaaaatgctgcactattttattttaaataaaattgcatgttacttcatgatgattagttctaacccaatcagcaaaagtcttcttaaaataataaaatctgaagaaaacaagatgtaaacgcaagaatacttattagaattattaatacataattttcctggaatgctaataatctaaagtaatctaaggaaatgtttatttcatcaacttgtgacttaatctaattacgttgattgaaactgttaaaactgtgccaataaaagaaatatttgtaatgaaatcatgtatttactatttccattgtaactgaacaatgcacagaaaatttccctccaaaacaccactgccaagcactatgggaaccacttgtgtctatttacctacaacatccacgatacaacatccatctacaacatccatttaacataaatcatggatttcagaaaagctaatgtttttaataaatgagaattgattgttaaataagacaacagtaaagccaccgaaaggtatatgcaaattagtccattaagagtatttattgttattttatgtgagcacacagaactagagctaaagttaaagatgtgagtagggcatatatcatttcttcttcacaaagctgacactctatcctgacattaaacaagtaaatgtaacaagttacacaaaagtgtatgagaagcccagatgtgtatagtatggaaagaggcatcagtgaagtgtgggacaacctcaagtgccctgatatatgtgtgaccgaagtccttgaatgagaagggaagaaatatttaaggatataatgtcagattttttccaaatttgctgaaattataaaaacgcatattcaagacattcaacaaatcataagcacaagaaacatgaagaaaactacaccaaggtatactataaccaaattttcagagaaacaatgataaaacaataaatggaaaaactttaaaacaaccaggaggaatggggtgaggcattatatacagagataaagatgatagcaagttgctagccagaaatgactcacgtgagcagacagtggagcaatatctttaaagttctggagggtaaaagaaaagccctgtcaactaggtataattttatatccagtgaagctatcttccaaaaatgaaggcaaatcacattttcatatatacaaaaggtggaataatttatcaccaagatatctgcactataagaaacgtcaaaagtttttcaggtgaaggaaaaattataccagaagtctggacctatatgaaagaatgaagagtcctagaaataataaatatttgtataataacaatattttttcttattaattaaatttatttgaaagataagtgattgtatgaagaaaataataacaatatattgttggggtttataaaatacagagaaataaaaagtgcaaaaacaacagcagaaaaaaaagcaaggggagaaatcgaagtacacagttgtattgttcttatactttacatgacgtggtataacatcactttcaggtagactgtgataagttagagttgtgtatcataaagcctaaggcaactactaaaaacacaataaggatatgtaggtaatgagctaacaaattagataaaatgcaaccattaatttgaaaattaattcaaaataagacagaaaaaaagagagaaaagagaaaaaagagcacatggtacaaataataaaagcaagatggcagatttacacacaaccacatcaactaccacatcaaatttaaacggtataaacatcccaattaaaaggcagggatactttttcctatacggcaaattagacgcttttagcctgcctcaggcataaagattaactctgtgacctttaattcaagaaggaaaatgagaatccaccagaattgtaaaggaaactccagatcctgggaaggcaaatgtgggcaaacagcccctgtgatggcatctggctaataagtgagtgaagccccaccacacaaaagaggcagacagcctccctctgtgactcacctttccaatggggatttgagtaaccaaggccaaaggagagcactttgtttctcccaagccctggagctaacttgggatgaagatggagatgttgtgagggaaagacactgggaaaacctgaagccattttatcagacctgggaacaagagcaggacgccatgttttatcctggtgcatacaatgtcagccattatttggcaatccggcaggatggcctcacaggtattttggtctcaggccagagattggagtgcctgctctgaagtggggtaggggcctccacagccagaactgtgaaaatcacctcagcagaaggcattagaactgtactctccactgtggcaggcctggggcaggagagctgctacagctgcagtttctcctggacaataagacttgcagctacagccagcttggtaacatggaaccagtctccatgtgctattgttgggtgccccagcctgctcttctgagattacagtacagtggagtcctctctgatccacacccaggcaaatctccaggtattcagaccaccctctcacctggatcagccacctgaacccctccagccttcctgtgcatagattgtgctgcagtgaagccctctccactccacgtgtaggcagatctccagatatgtggagcaactgcttgcatggactagcagtctcagtctcccacccttcctgtgcagggatcctgtgtgggttatgggggaatgggaggagggggagttctacttcacacccaggcagatctcctggcatttggagcactcactcacctggaacagcagcttcactccctgcattcttcctgtgcatagaccatagtgcaactgggccatctcgactctacacccaggcagaccttcaggcatccaaagcacctgcttgcctagactggcaggctgagccactccacccttcctgtgcaattatctgggtgcataggggccctctttgtttcaagcccaggcagatctctaggcatcaggagcacccaatcttctggattaggactttagcccaccccatccccatgcagagaacttggggccaaggagatttctcagcttcctgcctaaacacacttctgggcacttggtggctgcccactggattccccattggccctggtacttgtccctgccatcaagggacttgtaaatggacctgccaggtccagccttacacatcttgccccccaccccacagcgttaagggaacttggaccactgttcactctaagaatcagcctactgcctaaggcaacagagagcttctctgtaaacaaagatcaggtatataaccagatcattggccataggcagcgcttacaaaaagcaccatctactggcttgtgggttgaactgcacagcccaatataaaatctgccaacagaagtgcctagggatataaaagcaaagtcaaaagaccctacccagcactctctgcagtcacaccccagggagtaagggaaagggaaagaagaaagaaacagtaatatcacaggagaagaaggaaagagaaaaaatcctacctggaggaaaatagttacaaaaattataactacagcatctccagatgagaaggaaccagtgcaagaattctagcacaacgaaaaatctgaatgtaataacaccactaaaggatcacactaacggctccagcaattgtccgtaatgaatatggaaactaagaaatgacagaggaagaattcaaagcatgaattgcaaagaagctgaaggagatctgagctaaggttgaaaatcaacacaaagtaactcctaaagcaattcgggaaatgcaggaagagataaacatcttcaaaagaaatcaatcataacttctggaatttaaaaactcacttaaggaatttcaaaatacaattgaacgatttctcaatggactgaaccaagcagaagaatttcagagcttaaaggctagtcttttgaactaactcagtcagacaaaaataaagaaaaataatttttgaaaatgaagagtctttgaaaaatatgagataatttaaagtaactaaacctataaattatcaccattcctgaaaaaaacggaggaaaagaaaacaacctggaaaatatatttgagggaataattcaatattgttttcctagtcttgctagagaagcaaatatccagatataagaaatctacagaacacttgtgagatactatgcaaaatgaacatcaccaaggtgtattgtaaccagaatgtccaaggtcaacaccaaagaaaaaatcttaaaggcagctagagaaagaggtcagatcacatacaaagggactaacagcggatgtctcaacagaaacctcataagccaggggtgattcgctgcctatttttatcattcttaaagaaaagaaatttcggccgggcgcggtggctcacgcttgtaatcccagcactttgggaggccgaggcgggcggatcacgaggtcaggagatacagaccacggtgaaaccctgtctctactgaaaatacaaaaaattagccgggcgtggtggcgggcgcctgtagtcccagctactcggagaggctgaggcaggagaatggcgtgaacccgggaggcggagcttgcagtgagccgagatcgtgccactgcactccagcctgggcgacagagactctgtctcaaaaaaaaaaaaaaaagaaaagaaaagaaatttcaaccaaaaataaatttcatatactgccaaatcaagcttcataagtgaacaagaaataaaatattttccaaagaagcaagagctaaggaaatttattgacactagatcacctttacaagagatccttaaaagagttctaaacatggaaacaaaagagcaatatctgctaccacagaagcacacttaagtatatagcctacaaacccttaaaaaacccatgcaataaaaactaccaaggaaccagctaacaacttcatgataggatcaaaactgcacatctcaatattaaccttgactgtaaatggtctaaatgccctcacttaaaaggcacagagtggcaatttgaaaaaaaaaatacatctactgtcttcaagagatccatctcacatttaataacattcataggctcaaagtaaagtgttggagaaagagctactgtgcaaatagaacacaaaaaacagtaagaccaatcctagataaaacagactttaaatcaacaacagtaaaaaagaacaaagaagggcattacataatgataagggcttcaattcaacaagatggctcatgtatcctaaacacatatacacccaacactggagcactcaaattcataaaacaagtacttttagatctatgaaaagacagacagccataaaacaatagtagaggacttcaacacaccattgccagcattagacagatcattaaggcagaaaactaacagaaattctgcagttcaattgaccaactggacctaagagacactgacagaatatttcacccatcaaccacagaatatccactctttttgtctgcacacagaacatactgcaggatcatccacatcctcagtcataaagcaagtgtcaataaatttttttaaaattgaaatcatacccatcatattcatgaaccacagtggaatgaaaatcgaaatcaataccatgaagctcccttgaagccatacaattacatggaaattaaacaacttgctcctgaaaaaattttaggtaaacaaaaaaattaaggcagaaataaaaaacattctttgaaatgaattaaaacagagacaaaacataccataatctctgggatacaccaaaagcagtgttaagaggaaagtttatagcactaaatgcctacctcaaaaagttagaacaatctgaaattaacagtctaacatctcacttagaggaactagaaaaacaagaacaaactaactccaaagcaagtagaagaaaataaataactaaaaatagatcagaactgcataaaactgagacacaaaagcccccaaaaaatcaacaaaaccaaaagatgtttctttgaaagaataaacaaaatcaacctaccgctatttagattaacaaagaaaacaaaaggtgatccaagcacaattagaaatgacaaaggtgacattacaactgatcgcacagaaataaaaagatttccagagactattatgaacacatctttgcacacattttactgtagaaaatttatgtttctatagtattggaaattctggccagggaaatcaggcaagataaacatataaagggtattcaaataggaagagaggaagtgaaattgtcactgtttgcagatgacatgattgtatatttagaaaacgccattgtctcagcccaaaaactccttaagctgatgagcaacatcagcaaagtctcaggatacaaaatcaatgtgcaaaaatcacaagcacttctatacacgaataataaacagagagccaaatcatgagtgaactcccattcacaattgatacaaagagaataaaatacctatgggacagaacagaggcctcagaaataacgccacacatctacaaccatctgatctttgacaaacctgacaaaaacaagcaatgcggaaaggattccccatttaataaatggagctaggaaagctggctaccatatgcagaaaactgaaactggaccccttccttacaccttatacaaaaattagctcaagatagatgaaagacttaaacataagaccaaaaaccataaccctagaagaaaacccagacaataacattcaggacataggcatgagcaaagacttcatgaaaaaatgccaaaagcaattgcaacaaaagccacaattgacaaaagggatctaattaaactaaagagcttctgcacagcaaaagaaactatcattagagtgaacaggcaacctacagaatgggagaaaatttttgcaatctatccatctggcaaaagtttaacatccagattctacaaggaacttaaacaaatttacaagaaaaaaacaaacgaccccatcaaaaagtgggcaaaggatatgaacagacatttctcaaaaaaagacatttatgcgtccaacaaacaaatgaaaaaagttcatcatcactggtcattagagaaatgcaaatcaaaaccacaatgagataccatcttatgccagttagaaaggcaatcattaaaaagtcaggaatcaaaagatgctagtgaggctgtggagaaataggaaggattttacactgctggtgggagtgtgaatcagttcaaccattgtggaagacagtgtggcaattccctaaggatctagaaccagaaataccatttgacccagcaatcccattattgtttatatacccaaaggattacaaatcattctactataaagacacatgcacacatacgtttattgtagcactattcacaatagcaaagacttggaaccaacccaaatgcccatcaatgatagacaggaaaaagaaaatgtggcacatacacaccatggaatactatgcagccataaaaaaggaagagttcatgtcctttgcagggacatggatgaagctggaaaccatcattctcagcaaactaacacagaaacagaaaaccaaacaccacatgttctcactcaaaagtgggagttgaacaatgagaacacatggacagagggaggggaacatcacacaccagggcctgtcatggggtaggggggacaagggaagggataacattaggacaaatacctaatgcatgcatggcttaaaacctagatgacgggttaatgggtgcagcaaaccaccatgacacatgtatacctatggaacaaacctgtgcattctgcacatgtatcccagaacttaaagtataataaaaataaataaataatccattttataacttctagaaataaatcataactcatatagcatgtgagaatacagtatcaaaatatcacatgtatcccataaatatgtacaattattatgtatcagtaaaaaagaaccccttctagtttagaagatatccctgtgtcttatcatttagggtcgcatatactttcttttttataacattcattcatcttaattttttggttgttatatatttcttaaagagtgttccattagcccagaaactattgtttattcactattgtatttttcatgccaaataagtcaaaataaagattcaataagcatgaaaaaaaagaaaatttatgtttctaggataaattcctagaaacacataatctcccaagattgatttagaaagaaattgaaaccctgaacaaaccaatattaagtcctaaacttgaatcagttatttttaaaaaaaaaaaacctaccaaccaataaaaacctccagaccagatggattcacagctgaattttaccagacatacaaaaaagaactggtaccaatactactataactgttcaaataaatcaaggagaagggactcctccctaactcactcaatgaagccagcatcaccctgataccaaaacctggtaaagaaacaatgagaaaagaaaactacaagccaatattcctgataaacataaacacaaaaatcctcaacaaaatactagcaaaccaaattcaacagcacatcaaaaagttaatcacaatgatcaagtaggcttcattcccgcgaggctaggttggtttgatatgagcaaatcaatgtgattccccacataaccagaattttttgaaaaaggtataatcatccaatagacatggaaaaagcttttgatacaatccaacatcccttcatattcaaaaaccctcaagactaggcattgaaggaacatgccccaaaataataagagccatctatgacaaacccacagcctacatactgagtgggcaaaagctggaagcattcccttgagaattggaacaaggcaaggatgtctactcttaccactcctgtttaacatagtagtagaaggccttgccagagcaatcaggaaagataaaaaaacaaaaaagggcattcaaataggaaaatacatcaacgtatctctttttgctgatgatatgattctatacctagaaaatcctaaagactccacccaaaggctcctggaactaataagggacttcagtaaagtttcaggatacaaaatcatgtataaaaatcagtagcatttctgtacaccaataatgtttcagctgagagccaaatgaagaatgcaatcacatttacaatagcatcaaaaaactaaactacaaaagaaaaataaaatatttgtgtcattttattacctagaaatacaccaaaccatcaaaccaagaaggtaaaaatctctacaaagagaatgaccaagcactaccaaaagagatcatagatgacacaaacaaatggaaaagcatcccatgttcatggataggaagaatcaatactgttaaaatggtcataccccccaaagcaatctacagattcaacattattcctatcaagctatcaatgtcatttttcacagaactagaaaagattcttctaaaattcatatgaaaccaaaaaaaaaagcccaaagcctaaactaaaagaacaaagacagaggcatcacattacccagcttcaaactatacaaggccacagtaaccacaatattctggcactggcacaagaacagacaaatagaccactggaatagaatatagaactcggaaataaagctgcacacctatagccatctgatcttcaacgaagttgacaaaaacaagcaatgaggaaaggactccctagttgataaatggtgctgggatagctggtgagccatatgctgaagaatgaaactgaacccctatctttcaccatatacagaaattaattcaagatggattaaagatttaaatgtaagactccaatctttaagaatcctaggggaaaatctaggaaacactattatggacattggccttgggaaagaatttatgaccaagtcctcaaaagcaattgcaacaaaaacaaaaatttacaagtggggcctaattaaactaaaaagcttctgcacagcaaaggaaactatcaatagaggtaacagacagcctacagaatgggagaaagtactcacaaactatgcatcccacaaaagtctaacatctagaacctacatggaattaaaacaattaagcaagctagaaacaaataattccactaaaaaaaaggcaaaaaaaaaagacacgaacagatacttctgaaatgaagacatgcaagtaaccaaaaacatatgaaaacaatgctccacatcactaatcatcagagaaatgcaaaccatgagataccatctcacaccagtcagaatggttattatttagaaaatcaaaaggcaacagatgctggtaaggctggggagaaaagagagggcttatatattgttgggggactgtaaactagttcagccactgtggaaagtagtttggagatttctcaaagaacttaaagtagaattaccctgacccagcaatcctattactggatatatacccaaaagaaaacaaattattctaccacaaagacacatgcattttatgttcatcacagcactatttgcaatagcaaagacatgaaatcaacctaggtgctcatcgacagtggcttgcatatagaaaatatggtacatatacatcatggaatactatgcagccacaaaaaataatgaaatcatgtcctttgcaacaacatagatgcagctggaggccattatcttaagcaaattaatgcaataacagaaaaccaaatacccatgttctcagatataagtgagagttgaacatttgatactcttggacataaaaatggcaacaatagacactgcaaactaatgaaagggggagggtggcaggtttgaaaaactatcaggtagtatgctttgtactgagtgatgggattaataataccccaaacctcagcatcacggaatacacccatgtaataaaactacacatgtactcccaaatctaaaataaaatttgaaaaataaaataaaaaattaaaaatgagaggtggagccaagatggccgaataggaacagctccagtctacagctcccagcgtgagcgacacagaagatgggtgatttctgcatttccatctgaggtaccaggttcatctcactagggagtgccagacagtgggtgcaggacagtgggtgcagcgcaccgtgcatgagctgaaacagagtgaggcaatgcctcactcgggaagtgcaaggggtcagggagttccctttcctagtcaaagaaaggggtgacaagacggcacctggaaaatcaggtcactcccaccctaatactgtgcttttccaataggcttaacaaatggcacaccaggagattatatcccgcacatggctcagagggtcctacgcccacagagtctccctgattgctagcacagcagtctgagatcaaactgcaaggcagcagcgaggctgggggaggggcacctgccattgcccaggcgtgcttaggtaaacaaagcggggggaagctcaaactgggtggagcccagcacagctcaaggaggcctgcctgcctctgtaggctccacctctgggggcagggcacagacaaacaaaaagacagcagtaacctctacagacttaaatgtctctgtctgacagctctgaggagagtagtggttctcccagcacgaagctggagatctgagaacgggcagactgcctcctgaagtgggtccctgacccccgagctgcctaactgggaggcaccccccagtaggggcagactgacacctcacacggccaggtacccctctgagacaaaacttcctgatagcagcatttgcggttcatgaaaatctgctgttctacagccatcgctgttttgcagccactgctgctgatacccaggcaaatagggtctggagtggacctctagcaaactccaacagacctgcagctgagggtcctgactgttagaaggaaaactaacaaacagaaaggacatctacaccaaaaacccatctgtacatcaccatcatcagagacaaaaactagataaaaccacaaagatggggaaaaaacagagcagaaaaactggaaactccaaaaatcagagcacctctcctactccaaaggaatgcagttcctcaccagcaatggaacaaagctggatggagagtgactttgattagttgagagaagaaggcttcagacgatcaaactactccaagctacaggaggaaattcaaaccaatggcaaaaaagttaaaaactttgaaaaaaaattagacaaatgaataactagaataaccaatgcagagaagtgcttaaaggagctgatggagctgaaagccaaggctcgagaactacgtgaagaatgcagaggcctcaggagccgatgcgatcaactggaagaaagggtatcagtgatggaagatgaaatgaatgaaatgaagcgagaagggaagtttagagaaaaaagaataaaaagaaatgaacaaagtctccaagaaatatggggctatgtgaaaagaccaaatctacgtctgattggtgtacctgaaagtgatggggagaatggaaccaaggtggaaaacactctgcaggatattatccaggagaacttccccaatctagcaaggcaggccaacattcagattcaggaaatacagagaacgccacaaagatactcctcaagaagagcaactccaagacacataattgtcagattcaccaaagttgaaatgaaggaaaaaatgttaagggcagccagagagaaaggttgtgttacccacaaatggaagcccatcagactaacagctgatctctcggcagaaactctacaagccagaagagagtggaggccaatattcaacattcttaaagaaaagaattttcaatccagaatttcatatccacccaaactaagcttcataaatgaaggagaaataaaatactttacagacaagcaaatgctgagagattttgtcaacaccaggcctgccctaaaagagctcctgaaggaagcactaaacatggaaaggaacaaccagtaccagccactgcaaaaacatgtcaaattgtaaaggccatcaaggctaggaagaaactgcatcaactaacgagcaaaatagccagctaacatcataatgacaggatcaaattcacacataacaatattaactttaaatgtaaatgggctaaatgctccaactaaaagacatagactggggaattggataaagagtcaagacccatcagtgtgttgtattcaggaaacccatctcacatgcagagacacacatgggctcaaaatacagggatggaggaagatctaccaagcaaatggaaaacaaaaaaaggcaggggttgcaatcctagtttctgataaaacagactttaaactaacaaagatcaaaagagacaaagaggccattacataatggtaaagggatcaattcaacaagaagggctaactatcctaaatatatatgcacccaaaacaggagcacccagattcataaagcaagtcctgagtgacctacaaagagacttagactcccacacattaataatggtagactttaacaccccactgtcaacattagacagatcaacgagacagaaagttaacaaggatacccaggaattgaactcagctctgcaccaagcagacctaatagacatctacagaactctccatcccaaatcaatagaatatacatttttttcagcaccacaccacacctattccaaaattgaccacatagttggaattaaagcactcttcagcaaatgtaaaagaacagaaattataacaaactgtctctcagaccacagtgcaatcaaactagaactcaggattaagaaactcactcaaaaccacgcaactacatggaaactgaacaacctgctcctgaatgactactgggtacataatgaaatgaaggcagaaataaagatgttctttgaaaccaacgagaacaaagacacaacataccagaatatctgggacacgttcaaagcagtgtgtagagggaaatttatagcactaaatgcccacaagagacagcaggaaatatccaaaattgacaccctaacatcacaattaaaagaactagaaaagcaagagcaaacacattcaaaagctagcagaaggcaagaaataactaaaatcagagcagaactgaaggaaatagagacacaaaaaaccgttcaaaaaattaatgaatccaggagctggtttcttgaaaagatcaacaaaattgatagaccgctagcaagactaataaagaagaaaagagagaagaatcaaatagacacaataaaaaatgataaagcagatatcacaccaatcccacagaaatacaaactaccgtcagagaatactacaaacacctctatgcaaataaactagaaaatctagaagaaatggataaattcctcgacacatacaccctcccaagactaaaccaggaagaagttgaatctctgaatagaccaataacaggctctgaaattgaagcaataatcaatagtttaccaaccaaaaagagtccaggaccagacggattcacagccgaattctaccagaggtacaaggaggagctggtaccattccttctgaaactattccaatcaatagaaaaagagggaatcctccctaactcattctatgaggccagcatcatcctcatagcaaagcctggcagagacacaacaaaaaaacagaattttagaccaatatccttgatgaaccttgatgcaaaaatcctcaataaaatactggcaaaccaaatccagcagcacatcaaaaagcttattcaccatgatcaagtgggcttcatccctgggatgcaaggctggttcaacatacgcaaatcaataaatgtaatccagcatataacagaaccaaagacaaaaaccacatgattatctcaatagatgcagaaaaggcctttgacaaaattcaacaactcttcatgctaaaaactctcaataaattaggtattgatgggacatatctcaaaataataagagctatttatgacaaacccacagccaatatcatactgaatgggcaaaaactggaagcattccctttgaaaactggcacaagacaaggatgccctctctcaccactcctattcaacatagtgttggaagttctggccagggcaatcaggcaggagaaggaaataaagggtattcaattaggaaaagagggagtcaaattgtccctgtttgcagatgacatgattgtatatctagaaaaccccatcgtctcaggccaaaatctcctcaagctgataagcaacttcagcaaattctcaggatacaaaatcaatgtacaaaaatcacaagcattcttatacaccaataacagacaaacagagagccaaatcatgagtgaactcccattcacaattgcttcaaagagaataaaatacctaggaatccaacttacaagggatgtgaaggacctcttcaaggagaactacaaaccactgctcaaggaaataaaagaggatacaaacaaatggaaaaacatcccatgctcatgggttggaagaatcaatatcgtgaaaatggtcatactgtccaaggtaatttatagattcaatgacactcccatcaagctaccaatgactttcttcacagaattggaaaaaactactttaaagttcatatggaaccaaaaaagagcccacatcaccaggtcaatcctaagccaaaagaaaaaagccagaggtatcatgctacctgacttcaaactatactacaaggctacagtaaccaaaacagcatggtactggtaccaaaacagagatatagatcaatggaacagaacagagcccacagaaataatgccgcatatctacaactacctgatctttgacaaacctgagaaaaacaagcaacggggaaaggattccctatttaataaatggtgctgggaaaactggctagccatatgtagaaagctgaaactggatcccttccttataccttatacaaaaattaattcaagatggattaaagactgaaatgttagacctaaaaccataaaaaccctagaagaaaacctaggcaataccattcaggacacaggcatgggcaaggacttcatgtctaaaacaccaaaagcaatggcaacaaaagccaaaattgacaaatgggatctaattcaactaaagagcttctgcacagcaaaagaaactaccatcagagtgaacaggcaacctacagaatgggagaaaattttcacaacttactaatctgacaaagggctaatatccagaagctacaatgaactcaaacaaatttacaagaaaaaaacaaacaaccctgtcaaaaagtgggcaaaggatatgaacagacacttctcaaaagaagacatttatgcagccaaaaaacacatgaaaaaatgctcgtcatcactggccatcagagaaatgcaaatcaaaaccacagtgagataccatctcacaccagttagaatggcaatcattaaaaagtcaggaaacaacaggtgctggagaggatgtgtagaaataggaacacttttacactgttggtgggactgtaatatagttcaaccattgtggaagtcagtgtggcgattcctcagggatctagaactagaaataccatttgacccagccatcccattactgcatatatactcaaaggactataaatcatgctgctataaagacacatgcacacttatgtttattgaggcactattcacaatagcaaagacttggaaccaacccaaatgtccaacaacgatagactggattaagaaaatgtggcacatatacaccatggaatactatgcagccataaaaaatgatgagttcatgtcctttgtagggacatgcatgaaatttaaaatcatcattctcagcaaactattgcaaggacaaaaaaccaaacaccgcatgttctcactcataggtgggaattgaacaatgaggacacatggacacaggaaggggaacatcacactccagggaaagttgtggggtggggggaggggggagggatggcattaggagatatacctaatgctaaatgacgagttaatgggtgtagcacatcaacatggcacatgtatacatatgtaacaaacctgcacattgtgcacatgtaccctaaaacttaaagtatcataataataataataattaaaaatgaaaggcagagatttcagattggattaaaacagaaaaatgcaagtatatgctgcctaaaagaaacacgctttaaatatagagacacaaatagcttaacagtaaaaagatgggaaaagatacaccatgttaacatagtcaaaagatagctggagaggctatattaatatcaaagtagatttcagagcacagattattacctgagataaagagggtcatttcatattagttaagtggttagtttaagagaatacaatcctaaataattacacactaataatagagttccaaaatacttgaaaaaaaatcaaggatagagaaatccacaattacagctaaagattcgaacaacactacaaaccaattttatctaattgacatttgtataatactgcacctatcatcaacagaatagacgtttttttcaagtgcatacagaacatttaccaagatatattctgggccatataacaagtctcaatagattttaaattactcaaattgtatgatgtgtgttctctgtttacaacagaattaaatttctaaaataagcaacagaaacatatctggaaaatcttcaaatatctgaaagttaaataacacacttctaaataccccatgttataaacaagaaatcaaaaagaaaattagaaggtattttgaactgaatgagaatgaaaggacagcatacaaaatttgttggaggcagctgaggtagtatttagcttatgtagcttgaggtattatttagctcagtttatgaagaaataatttaaattatttttacagacatgactgtccttggagaaaattttatagaataaacaaaaatgccatgacagttgtttttcttttcttttttttttttttttaaatcttcaggggggtaaattttaagacctccagtggatgtctgaaacctcagatggtaccgaactatatatactacatgtacgctacctttttccagtgtaaacatacctaagataaaatttaatttataaattagtcacagtaagagattaacaacagctaatgttaaaatagaacaattaagtaaaataagggttacttgaactgtgatactactgaaataccacaacagttgatcttgtaaatgagatggttactaagtgactaataagtaaggagcgaatacatttggacaaaggaatgattcaacttctgagcagaatggagtgggatggcaagagattttatcacactactcagaacagcgcacacttcaaaattcataaactctttatttctgtaattttccatttttgaaccacagttgaccttaggtaactgaaaccatacaaagtgaagaataaggggggactacggtatagctactatgtgagtttagcaaggttgcaagatacaagaccaatgtaccaaagtcaattgcatttctatacactagtgatgaacactattaaagtgaaattcttaaaaaataatgccgttccccttagcatgaagagaatatttagagataactatgacaagtaaaagatctgtactctgaaaactataaaatagtactgatcaaaaaataaagatgtaaataaatggagagatattccctgttcatgaataggaagattgaatattgttaaggtttcagttcttcccaaattgaactataaaattaatgcaatgccaagcaaagtcttagcgagcttgttttgtagaaatcaacaagctaattctaaaattcatatgaaaatacaaaggactttgaatagccaaaacaactttgaaaaagaatagcaaagtcaaaaactttaactatttgatttccagatttattataagtctatagtaatcaaggcaatgtggtattagcatcaaaatagatttaaaaaatcaatgaaacagaataaaaagtccagaaatagacccacacatgtaatcaattgatttttgacaaagttgcaaaggcaatccagtggagaaatgataatctattcagcaaggagtgctggcacaactgactaaccacatgcaaaaaaagtcttcaaatgaacttttaattattccttgcaccatatacaaaaattacttcaaaatggatgataaactgtaaaacctaaaagtatataactttttaaaaactggagaaaatttttgtgatttgggctatacaaagatttctagggtataacagcaaaaacacagtgcataaaataagaaattgattagttagttgatggtcactaactatccctgccagtattcatagattaatcgctagaagtagatgaatattgacaaattatcctccagaaatgtgtcatcactaacagagtatgagtgtctatttcactgtcatattttctatattggataatataattcaacagatatttgccaatataaaaggccctttatcaggtaccttattgtttctttagtttgtctttattattataaaagtaataaagtgattttgtaaaaataataaaaagtgattctatgtgtatgtttattacccactggtgtttcttcttttgtcaaatgtcatttcatgccaaagattaaaatgacaatggcgagctccaacacaacggttgaccttccagaggtaggagatgaaatagcagagagtttcatgaactagacctccaggctttccctgtctatatttactccatgcagtaagctaaggacacttcattaatttctgcaataaaaaccttttaggctattttgggcaaatactctgattttctgccctgtctctgctgacactccaaggtgtcatccaggtatacagcaggtagaaggccttattgatctcaggaagagggaatggtggaaattgggtatttactcagccccttgaactgccctctgtccactttggtatgcacaatgatgtccctcccttggctgcttgcttctcccagtgcctgtagctgatgcaccattggctttgggcttgatttgggatggtggtcctctctgtgactttgtccccattatagctacaggcccctgcattgtggttttgattcctatttggttgctggctgaggcagtccaccctgcagtctggacttgctgtcacttcattgtactgccatagcccaccctggtctacttctgagttatgctttcaaccaacttccatgtcccaattccatattccatgtctcacaggaaccaagacagatcagagttaggaatcttttctctcactaactgtgcttatagacaccattactctgatgcagcttgagaagcattcactgttaggggtcgcagatgttacctggaacaaagtctgctctcaccatatccctgaaaatacctaacatattctcaagttgtggaaagtcagtggcagggagaactcataacccagctatttagccacacatcttccctacctacatcccccttcctcttcccacaatctccgagaccaggaaaaaagcacactttcaaacttctcaagattaaagctctatgatccattctgatatgtcaaaggaggagctctatcacatagaaatttctctttctctcaacaaagcccagtttttaaaatcattatctaaagatgcgagaaaagtcatctggtttgagactcaatgctgattggtgattttcttatttattaattaatacattcaagaaatatttcttgtgaaaattacttctcaggtgtggaaatgcaatggcatacaaggaaaaaaaaggtcttgacctcatagagtttaaattctagtacagaagacatacaatgtaataatcaaatccagtttgtaagttttatgaaaataaagcagggtaaagtgacagagaaaaatagaataagagaggatataggtgttattttcaaaaagtaatccaacaaatttctctgtgaaataaaatctaacctgccacctgtatgaggtgaaggaaggatccaagaacaagactagagagtttccaggcacagggaccaaaggctttggggtgggaacctgcttgaagagtccaaggactggcaggaggttagaacagagctagaacagagagtgagaaagtagagatggttacagataaagtccaagagacaggtaggggccagatcatgttgaactttgtaggttagctgtttcaacgtgtcgtctggggaaccagagggatccctgatatcctcaggggttccataaggtcctccttttcccaaatacttttttctaccaggttgaattttcttcatatagttcaatcaaaacaatatattgcaacagattgaatgcagaagaaaatatgaaaatccagctgtcttttattaaaccaaatattcaagagatttgcaaaaatgtaaaacaatgtcattctcctcactgtattatttttgtttttgaaaatatatattttttcacgccaggtgcagtggctcacacctgtaatcacggcattttgggaggccaagacaggcagatcacttgagcccaggagtttgagagcagcctggtcaacatggcaaaacccacctccacaaaaaaaattgtttaattaactgggtgtggtggtgcacacctatagtcccagctactcaggaggctgaggtgggaggatcacctgagcccaggaggcagaggttgcagtgagccatgatcatgccactgcagtctagattgggcaacagcacccatatatatatgggtgctcaaatatatatatatttgagacagggtctcactctattgcccaatatataaaaaatatgtcatttacattaacatataataggtttttattgttgttttaaaaatatttaacaaataaatatgtttacatattcttagttataattttaaataaattacatatttacagatatagcccacgtaaacaaaagctctttggagcccttcctcaataatttttcagagtgaaagggattctgagattaaaatgtttgagaatcatttttataaaacataagattttattcaaaggataatacgatccatctggaagtcttgaacagagtgctgatagactctattgcttttagaatatccatctggccgggcgcggtggctcacgcctgtaatcccagcactttgggaggccgaggcgggcggatcacgaggtcaggagatcgagaccatcccggctaaaacggtgaaaccccgtctctactaaaaatacaaaaaattagccgggcgtagtggcgggcgcctgtagtcccagctacttgggaggctgaggcaggagaatggcgtgaacccgggaggcggagcttgcagtgagccgagatcccgccagtgcactccagcctgggcgacagagcgagactccgtctcaaaaaaaaaaaaaaaaaaaaaaaaagaaagaaaaaaaaaagaatatccatctgactgctgagtgggaaattcactgcagagaaggaagagatgatgcaagaaaatggtagaggttgttgcattagtccaggcaagagatgactgtggcttggcctcagatgatataagtggagatggttagaagtcacatagaataaatattttaaaggtagagccaatagaatgtgttgattaaatgaatgtggggtatgaggagaaaaggggccaaggttgactccagggattctggtctaagcccctggttagatagtggcacaatctactgagaaggaggaaagaggtttcttttttttttttttttttttaaacacagaatctcgctctgtcacccaggctggagtgcagtggcgcgatctcagctcactgcatgctccaccttcccaggttcacgccattctccctcctcagcctcccgagtagctgggactacaggcgcccgccaccacgcccggttaatttttttgtatttttagtagagacgaggtttcaccgtgttagccaggatggtctccatctcctgacctcgggatccgcctgcctcggcctcccaaagttctgggattacaggcgtgagccaccgcacccggccagaaagtggtttctaaggtactaccagctctctctctccctggagcaagaagccttatgaatctatcttgcactttaaaagaatgcaaggaaaaaagagataaattaaaaggtattaatttaatatttccaaaatgttacccctgttacatttcatatagtttcatcttaactatctaaaacaagtgcatagaaaaatactggaaggaaatatcaaaatgttaacagtggtcttcactaattaaaggtttgccagaggattttattttctcttgcataggttgcttctatatctcacaaactcttacagtgagtgtttattactgtaatttttctcagaagtaaaattattttaggaaaaaccattcaaagctcagatgcactatgtggtgtctatgaacttgaagatacctccatttgaagagatgttctcccttgagaagatgagtcggtggaaagtgccctatattatgcatcaagcataatttccatcttggttcatctgggatatttgtacctttacaaataattaatttttaattaatttttatacctttaaaaataatcacagataattattttctgccacaatagtttcttcaattttttaattaaaagtcaatccaccttagactcgactctttggggtgataaaaaagagttcttgaataaggattctgaaagtccctaatacagccctcaaagaagtaaactaagtttaaagttattttcttgtttcttatgtctccatgcttgcagagtaaatttaatgccaggttttggagaaatctatcttagaataaaaacacagttatcagtgaagctacacatgtgacacttaaataaacagggaacagatagaaggaagttctcactgatgctggtgaactggatgtcctagtgagcgtgccacgtcaccagagttgataagcaactgactgaaaaccttggtctgggaagctgctgtggtcagagatcaaagtgagaagggaaagggaaatgccttttccacacctaataagattcatttttcttgttttccttcaccaactccacaagactgtcaaggtaattttttggtttgctactaagctaaaaaaggactcaaccattttaaagttagtaagacatgggaaataattacctttcaagactccataagagtcttcagagtcagggaacattgaccacctgcttgattataaaaaatagtctttgttcaccaaggtagccctatagcttcctagtgtctacagcatttacacatctactttctccttcacagcctctacctctggaatagagattcttctggaatattccagaggttgtaaggggtgtgactgttgccccatggggaaaataggggctgcttggtaagtttctaggcagttttttttttttttcataagtggacccattctgaggtctgtcctttcccctctctgaaaggaccagaacctgttgttctgggtttaattaagaaaagaagacatgcactcatggcgttcttgatctaaggcatccactcacccacaggaagagtctttggcaagacggtctcccgaggtgtcttctagagctatagttccatgttcaataagggagaaattacttaaactcatctcacaacttgattacattctcacaataatctagataatgaatacatgggagtagtaaatgaaagttcactttctactaaaatttcagaaagaaaataagtaagtctgttctctagaaaggaaaaagttttctcatttatgtaaaatgaatgagattagtcatcatggaggtaaatctagagattgtaaatctttacctggagaactttgacaacagtcaaaactctaatcaaaagaatggtgtgatttctaggaggcaggattacaacgtaagggaaaatctagccaattttacttaccctgtctgaaccaaattgggtggccaatgtgaagcatagaaaagagaaacccaagattcataaaatggtaatatttgtcaaactacagcctatgaggaatttggatgaatgaagatagattattaagatgtgtgtgttcagttaggataggagtaactcacagagcctcacctcctaataaatatccttccaatttttccataggctttttcattcatcatagtagtcacaaagtgactctgtaattactaattcagtttctcagctacttcagtattaatagaaggtatttcagatacaaacacaatctggtcattaaaaataaaaatctcttacacctctaaacctagcatgttgggaagccaaggcaggacaattgcttgaagccaggagtttgagacaaacctgggcaacgtagtgagatcatgtctttgcaaaaacaaatataaaacttagctgagcatggtagcatgcacctatagtcctaggtactccaaaggtttcagtaggaagatcacttgagtccaggagtttgatggtgcagtaagttatgatttcaccaatgtactccagtctgagtgacacaaccagacttatctctaaaaataaataaataaataaataaatatcttactttcaataaatataaatcctctactggtattatgtggataacaacacatactttcaataggttgtgatgaagatcaaaatagagaacatatttaatacatctgacatatgcctgacccataataaatatttggtaattctcctacctttttgcctctctttgcttttattcaaattacaacaaataaaagatacagagtaatattatccagctgatatggagaacctgctctctaacactgactacctctgtccttgggcaagtcattgatctctggccatcggattcctaagataaagcaaggatttggactagatgatatctgatttcttttctatctctaatattaaaagagactgagtatttaagattggtccttggggtgtcattttgattccattaagcctgagattcaattattctgctcaattgatctttcttaataataaacaaaatcaaacaacttagacaacattcaggttaacaaggcagcaaattagcaacacataacagaccttctcttaacttcccattaaaacacctacgaggatatacaaaaagataaaaactggcaccagtattgtaaactgaaaataagagaagaagatatgtcaaagttcagagggactttccactaatcgcatcattaatggatagggattgagaaatataatcttggatggcacaaacactaccctttgaaccagaacagcaacaaccccaaagcaagaggaagaccttggctctcccccactggccgaggtcaacttcaggacaaggggttgccctgaccggaaaaataggtgccatcccccactgaaatagagttatcatctgagcaagccaacatcataacctctcttttttccccatcagcagttctatttctgtatccatttagagtctacaattcccagtgaggtactaatcttgaagtagaataacagttggttaacagtgtagtgagtactaagtaggggttgggacaaggtgaatactgaaaactgagtgtggtgagcgttaggaagcagggaggaagagtgttatctttcatgtactgatatttcatacgaattgcattttaatcattgtcaaaaattgcaactctttcagcagatgtatgctgtgcccatactgtatcatatacaggacctttaaccctccttggctagagctaggaaggaaaaattgtcagtccctgagtgggcaatgagagagtcaaagaccacatcactcaccctgtctattggtaacccaatactggatctttgaaattattctgcaacatttagggaatgagatatttatactgaaggctcaagggagagcttattttttaaaattatcactatgaagacaaatagagcaatgctttatttatgaaacaatttcttcaaagtttttactagctaaatattctcaggctcttttagtgtttggtggccatttcccggttgattccactcacatgggatgttttgatcatagcttttcacaaaaatttgccaagataccgtattaactagtgtaactatatcacccttaatggttctgtcaactggcatatagcagatataattcgtcaactttgcagcagaatgcattcttaatttgaaagtaaaaaccaagtggaaatccttgttgtgttcaataatgcattagacacagtatagactgttaccagaaggatttggttctgctttctcttcaataagtcatgttaaaagaatgactgcaatattccaaactgttatattattgcaatcaaactgatgctggagaggtttcgaatctggatatttccttataaaataacaacctgaataaatgaaaagcaattcataactttcccatttttcactttaccattaggatagcagatagccatattttaggtcctttatttttcctcctaaactgatgtatataatttaacataaataatattttagaaatatgttaataattaagaaatttctcccttttcatatttttagtggtttccctacaggaatttagaggcggcagagggggaaggagtggtggtggtcatagctaacacttgtagtgacacttaccatgtgtcacatattatgctcagcattttacttacattctcttgcacaatcttgatgatcattctaggaaatagatatgtaattacctttattctacaaatagggggtgaaaatatcaggcatctggaaagcgttgtttcagaaagaaaatctgcaagagtggaaaggtattggctcatagaatgttgtaagaaattaaattttatgtataaccaagagagtttctaccttaattaaatttaacaagtatttattgtatgcccacaaggcaattttctaggcaattagggacaaaacaatgaacaaaacatataacaccatcatgtgacttactttcttcagtctataaatgaacaaatgaacaggtgatggtttccatgaaaaaaaaacatgataaaagatttgacagtgatggtaaatgatcaaggatacagagggtgtgaaaacaatgcctaaggatgatctctctgaggagagatctgcttttaggtagagaactcagtgaagaacagaagtgagatgtgaaaaactggggaaaagagttccagacagaataaacagcagttgcaaagatccttggatgaaaacaaagttggtaagttcaagaaagagaaagagggcaatgaggctggattaaaatcagcaaggggaagagtgaagaaagtgtagagatgtagtcatctttgtaagccatcgctttgtaagggctttgagttgtggtaaatgctttgggtttcattaaaaaataaagaaggtgggaagcttgagaggtgttccaaatctttgttcagctctcttcctggacacctagccaggccacacttcacagcatacgttgcagctcagtgtggtcatatgactgagagccagcctgtggagtgtgagtggaagtgaggtgcactacttccaggattgaacaataaaaattatccacccacgcatctctgtgtcattcctcctttcttgccttcagggatagaacggtggatgacagccttcaaatccatatgttgaagatggcagagccaccatcacctggaaacctaatgaccacattgagaaaagcctggccaacaaccagttcactcaccaaaaactcttacgtgagagagaattaacttccattttgtcgaggcataacacacgtgggtctatgtattatcacaacctagtctaccataacttccccagtatccattctgcccttttgctattgcaatagaacccttaattttcagcttagcacttgagtacacggaataaagattgtatttctaagcgtcccttgcagttaagtgtggtagcacaactaattttgggctaaaatggtatgaagtggaagtgatatacatatatatatattcccaaaggggcatagcctcctcttttccacttcccactggcctgaaagcagatgtggtgatgtcgagtcaccttgaaccatatggacaagttttatactctatgcataacagaaaaataagatgaagtagcttgggtccctgaactgtggaggcatcattaacctcacgatcttattaagcctgcagctatttggagtacaaaaattaattcaagatggattaaagactgaaatgttagacgtaaaaccataaaaaccctagaagaaaacctaggcaataccattcaggacataggcatgggcaaggacttcgtgactaaaacaccaaaagcaatggcaacaaaagccaaaatagacaaataggatctaattaaactaaagagcttctgcacagcaaaagaaactaccatcaaagtgaataggcaacctacagaatgggagaaaatttttacaatctacccatctgacaaagggctaatatccagaatctacaaagaacttaaacaaatttacaagaaaaaatcaaacaaccccatcaaaaagtgggcgaaggatatgaacagacacttctcaaaagaagacatttatgcagccaaaaggcacatgaaaaaaatgctcatcatcactgggcatcagagaaatgcaaatcaaaaccacaatgagataccatctcacaccagttagaatggcgattattaaaaagtcaggaaacaataggtgctggagaggatgtggagaaataggaatgcttttacgctgttggtgggactgtaaactcgttcaaccactatggaagacagtgtggtgattcctcaaggatctagtactggaaataccatttaacccagccatcctattactgggcatatacccaaaggattataaatcatgctgctataaaaacagatgcatacgtatgtttatagtggcactattcacaatagcaaaggcttgcaaccaacccaaatgtccatcaatggtagactggattaagaaaatgtggcacatatacaccatggaatagtatgcagccataaaaaaggatgagttcatgtcctttgtagggatatgaatgaagctagaaaccatcattctgagcaaactatcacaaggacagaaaaccaaacaccacatgttctcactcataggtgggagttgaacgatgagaacacttgggcacagagtggggaacatcacataccgggccctgtcgtggggtggggggaagggggagagacagtattaggagatatacctaatgtaaatgatgagttaacgggtgcagcacaccaacatggcacatgtatacatatgtaacaaacctgcatgttgtgcacacataccctagaacttaaagtataataataataataatttttaaaaaaacagaaaaaatatagaaaagaaaaaaaaagaaaaagaaaatggagtagcttgggtctctgacctgtggaggcatcattaacctcgctatcttgttaaacctacagctatttggagtttcattttcaatagttacctatatgctgaataatctagaagtcatcaggaggctttaagtaggtgaaacataattcaacacagactggtttatatgttacaactctggctgctgggtggaaaataagctgtgggggagggcagagtaaaatcagggaaagcagttaaaatgctattgcagtaatctaggtgacagatgatggagcaagctaaggaggaaagaagtagtaggattcagagtttttggaaggtggtgccaatggtatctaatataggcttgaggtaaggtgattgtcagaaagagaagagaaaatgactctggtttctgacttaagcaattgggcaaacaggccactaactgagatggagaacattgggaaagaagcaagtttgaggaagaaaatcaaactttttttaaaatttttagctagttattcaaatggagatagcaagtgacattctatggaatctagaaacttccagcttggagtttaggaaagatgttaggctagaaacaaaactttgggaaaatcattaataaatttataatacaatgtactagcataatatcaaagggctccatttatggcaagaatccagatacaatagaggcaatatcatgttggattgacccaacataacattgcatatttttctaattggcaacaaaatatgacttaatacttacatgatattcttgtttatttataattggcatgtagaacaataattggtatccagttctgggtccttcaggatgacatgatattaagagacaggacagatattattggcataatacacaagaagaccttggtgaattatcttctacttgtgtttttaatcacgttaactatagaagcattcctgtctatgttgtactatttgtctttcaagggactgggaaaggcttcatcactgggcactatgcttgctgaagaatagaaggaaatggcatttgcacttccaaagtcacaggataaaagagatgcctcccactgtcatcttctaccctctttgtgggtacttattctctgggtaattattgtctaattttcctgtttgatattagcctcacccttagcacctaggaaggaattgaatgaatactttcctgaggctctaagactcacataaagcccacatgcataatgggattaactatctagactgaatgacttttcccagttaatgtaagtactatttacaagagtcagcttaatatttttgaaatgggaagccttccttgcctcttgcacctgctggtggctccaggcgttctttgactgtggctgcataactccaatctctgcctctgcctttacccctctattcttttctgtgtctcttttaaggatacttgtcattgaatataagacccacctagacaatccaggatggtctcatcttgagatccttaattaattacatctaaaaagactatttttccaaataagggcatgttcagtttccagagattagaatgtggacatatattttggggagtcaccattaaacccactgcagtctcaagtcttgtcaatcattagaaccacctagataacttgataaagtacagattctcaggtcccatccttagccattcgaattccatagaccgggtttgtatgcatgtttgtgttttattgtagataagaactaaatctaggtttaaaaaagaaaatcactaggtgattctgatggttattgtcccctattctttcaagatcttaattttggaaaatgtcattgttatctgttacatcatcaatgcagtgaaagacaatagcatatcaagaatggcaagatggtatgggggaaattgtgggcttggaaatcaaccaaggctgaacctgaaatttggcgatatcttgtgttattacttaaattctgtgagcatcagttttctcacctgtagaatggaagtctttacattatagtgttattgtgaagattaatgagataacgtatgtaaaaccccagcacgtgctcagtgatcaattaaatggaaactattattagcaaaaggtggatctggcagcctatgttaatccatgtagctataatacaatcatccaaactgactcattaatcatatgtcatgatttgcttaattttgatatataaaaagaatagtatttataaattttggaattatgaacaggttctataaaacaatgagagagtgtaatggaaaatattacctctttaattattatagtgatgatttttcaacttccatatagtttccaaaaccctaggtaaatgaaaaatctctaatgttcaattgattaagtggcttcacccaaacttctcctatggactatattctgtctccccaaaattcatatattgaacgtcacaagggtgggatgccaatctaataagacagtggctttataagaaaacaaagagagagagagatcttaagcaatctttctctgccatgtgaggacacagtgagaaggcagccatctgcaaaccaaaaagagacccctcaatgttgaacttccagcttccagaactatgagaaatatacatcatttaagccactctgtttgtggtattttgttatggcagccctagcagatgaatacacccccccatctagcctatatccctttttagcatgattcttagaaaatatgtcctcattgttgtcatgaacatttcccaggcctgctacttctccttaattctaatagatggggtaaaggaaagttatgtgttacatgggagacaacagagagtgtttcctattaatttgtaagaaaccaagctcatcaagcacaaactatcatcagtatagacttctttaatgggattatcagacccatagtttctcttaattcaggatggatatttttccttgagtaattttttttcctctttctgtgagtaaattctctggccatctaggtaaatttattgctcatacttctgttcaaaaagctttgatattcaccgttgctttcagaatggccggaggacccatcaattcataactgcaaagacctccaattccttaactcctactcctctttgtgtaaacttttgatccaaactgtatgctgatgtcctactgaccagcattgttctttcactttctcacatttttccatctcattccttctacctcacatgccctgctagcacagtcaactatatccaatctaaacaacaggtcctacttcacctcctaccagctccaagaaggctttgctgaccactccaggaaatgactcagtccatgctagctttatccttgttgtgtcacattactctcaggactttgcacaggataaatgttcataaatattaatacttcttggtctaaatatatttctctatgtaaagagcccttgaacttctaaggcacttcttgtctgtatcagcaatttgaaacgaatcacgaaccttctgaggacagcccatatgtatgtttgtgttatttacattttctattgtgatttcactttctgcttctagtgtgagctacattgggagcttcttgaggactacatcccatgaatgagatttggaactaggaaagactacaggttccaacctagacttccctgctgctaaaattacactgtttagtaagtcacttcacaaccaattttatgagtaaatggaaatgataatccctgtccttcagggcatggtggctcacacctgtagtgccaactacttgagacctgggtaggaagatctcttgagctcaggagtttgagtccagcctggacaacatagtgagatgccatctctaaaacaaaacaaaaccataataagtacctcataggatttatatgaggatagaatgatgtattgtaaagtatctagcacagcatctgcctcatggtaaattgtcaatatgtgggagctttattcttatgtcccagtactcccaacacttttgtaggttaaatatttttaattgttaatttcaatatatatttctatataaagataaaatgggggaagggatgccatatttaaatgtttttgtaaggcctcttctaactcaagatgtcctgatgctataaactttaaagtgtatcagaacgcatagcacagaaggcagcacagtgttgaacaataatgctctttaaagtagctgctgcatttcccacatttctttcattgttcagaaaatggctcaataagcccactagatgatttggaattcattcaggtcttgtgagcccattgtttgcaattctctaactgtcattttacagtcacattggacccaaaggatagagtctgaaaatttattgaatgatggaattttccagttacagagcagaatcctaataattcagagacatctcactcctgtagaggtcccagaaaaaggttaacgtgaacacaattgcctgtcaaaatcttccaattataaactagttactagttaccttttcctgcagttgtgtacacaaattaatatttaatttggatgatcttcacccaaaaatgaaggttataggaatctgtgctgttgatttaaattagaatattatactccttttgtttttcctttccctatattgattccatgcctgagcagttaaaacctttgtggaacagagacatgacatggtgtcactgttggcagcacagaaagacacaaaggtagagagatttcaggaacagcaaaatccctgtttcttccaaatatagcctttcctggtttttacttagcctgaagtttctacttctggaattatatttgtggaaataatagtttttatgcactagttttttagaatagcatgtacacacatacaaaggcacacagcaaaaaaatgtaaaaaacatgtggaggtatagaaggtctacaaagcagtcctgaaaaggggaaggaagtaaaagttttaaattctgtttgactctgttgctgagaatataaattagtacaaccactacagagaacagtttggtttggaaacagttttagtttcctaaaaaaactaaaaatagagctaccatacactccagcaattccactgctgggtatatatgcaaaagaaaggaaaccagtatatcaaagaggtatcttcattatcatgtttgttatagcactgttcagaatagccaagatttggaagtaacttaagtgtccactgacagacaaatggataaagaaaatgtggtacatatacacaatggagtactgtttagccataaaaaagaaggagattcaggtatctgcaacatcatggatggaactggaggtcatcatgttaagtgaaataagccaggcacagcaagacaaacattgtatagagtcacttatttatgggatctagaaattgaaacaatttaactcatggacatagagagtagaaagatggttaccagaggctgggaagtgtagtgagaggttgaggagacatggggatggttaatgggtacagaaaattagaatgaatgaataaggactagtattttatagcacaaggtgactacagtcaataataatttaattgtacatttaaaaataactaagagtatagttggatttgtttgtaacacaaaggataaatgcttgaggggatgtatacctgatttccatgatgtgattatcatgcacagcatgcgtatattaaaatatctcatgtacctcacaagtatgtacatctgctactacatatccacaaaaatgaaaattagaaattattatttttaattctgcttgaaaattttgtcctgtgagaaaacattttaaatggttcattttcaaggcatgatcaaagtactggcagccagcctgtggatgtaacaaaccacatggctcatgcacctagaaggtcacaataaactgacagaatgtagaggaggagtcagcccataaaagggaagaaagtttcgttattgggaaatcaaaatttaagcgggaaaggggaccggggtatgggcttataaggggataatgaaactaaggttatgtctgggaagattgtaaccccatagtactcaactgatgaggaactggaagagggatttgcgtgctgggagataaattacctgctataactgccctgggtgtgcctgcctacctgacaccctatctggaaagactgccattaaaagtctcacttccgctattctttgtgtctctgagtccattctttgggtttggatggatgaatgtgtgtttctcacagtctggtgcagccctgagtaaaaaccaagatcttttatgccttaaatgtttttaaaaaaatgaaaaagcataaatctatgttttggtgtgttcatagtgtgcagtcattcttaggagcaactgtgaatttacaaaacctctccattctctcccctttcactcctacacctactatctgttcagccctgcgtctcttagaattttttaaactatattctctctcatctcctagcttctactttctttcattttccttcagggctaaactgtgataaaagatggatcctctgctctgcttagcaaccccgaaagctctctgatgctgcaggagacagtctcagctcctttgagtggccttctggccccttgtacaaagtcctcacaaactcatcaccttctcttctccccaagcacactgcattccaaccacaccctttgtcttcccattccctaaacaggtctcaaacattgaatcatgctacaaacatcttcaagccttttcacatgccctctggatgtcctcctccttttctgcctagtaaaagcatccaaatccttcctggcctcacccagtaccacacagattctacaggcagaatcaggttatatcctagactctcatgatttcagaggcttaagctcttcctcccacaaagttatcccatcatgggattatgcaacacaaattatgactgaagcaagaggcaaacagaagcccaagtcccacctggctcaggtttctctgcaccccacccagtccagctgagcatgaccacctctgttcacaaggtgctcctacacaccaccatcatcggtgttggtcttctaagtttctcaaaagaacccaaggctagaaggccagactcaaatttagaattctcagacttcttgaagatccacccaggaattttaagaacctaccatcacctgacttttcctccataccggctctgcccagtactgtgagcatagatacaaggatatcttagccggcatgtccaaactcaagccacaccaccaccaccattacgtcctccaagcaccatctcttggaaaatgagactatctggacaaaaaattccctggccatggatacttagaatatggtagaaaggaggccacaggatgtaggtggccacatctctgtggtcccaagactccttgcattatggagagaagtgtagccacctgcacccgggtcttctgacaaaaggagggggcagaaatgggagtcggggaagttaggatagcatctacggacaggggcttctcttgtcctgatttaagacgatcaggcagtggtgtgtcttcaaataaaaacaaagacaagtctcactctgtgaactgtttgtctctctagaacactggatctcaaccaggggtgatttgttctctatgggatacttggcaacgcctggagatattttgagttgtcgtgatttgagaagattgggagttgctactgtcatccagttggtagagaccaaggatgctgctaaaactcctacagcacataagacagttccatcacaacaataatataatattagtttggtacattacttctaatggcgaaaaccacaattatctttgcaccaacctaataataataatggaaaacattttctaaaagttaatttgtaaattggttatatataatattgttgtcaaacagatcttaaagcaatggttcatgtcacttaactgcacaaaagatttaatcacacacacacgcacacatgtgcatgcatgcatgcacacacccagcttatgaactaaagttcaactttctaagcttgacattcaatatgactcttgatctggagcctaccctgtttatcaatttaatctttctctatgatctccttatgtaacccaaagcctgtgtctatgctactatcagacttaaatattttagactgccatatggctatctcccatattttccctatcaatttttggcatactcaaccccattcctgatagtgaattaagtcttcagctggaccttctaatgtaaaatgttcaaattcagaaactaactacacttaaaacagaattacccactagaatacatcaaggctgtaccactaagataataataactagctcttgggattggaaggataagacaacgataccatgtataaatcactgtgaagatgttaccattatgatgtccctacctcataatagcactcaatgaaatgtctgtgtctctcctataattaaaaaggcattccaagtaggaaaatagcttttgcaaataaattaaagtaaggctatttacagtaaaataataataataataataataataataatgtagcacaatagaagcttatttctcactcacataaaatccaaaacagatgttcctgcttggtggcaggagtggaagttaggctgtgtggatgaaggaagactgcttcatagcttcacgcagagccgtaggctggaagtctccatcaccttccacatgtggcttccatgatcatcctgtgtgtcaacatccagtgggcagatgggaaaagagaaagcacagggtatgtgccaccacttcttaaccacttggccaagacatggtacacatcatctcagctcatattccaccggcaagaactagtcccacctggatgcaagggagggtaggactggaaaatgagggccctggctgggcagagcttctcagcaacaacgctacactatggaaaggacattagctatctttaccacagcaaagcacaagggtataggagatgaagcaaagacagagagcagtgggcaggcttgcctggctagaatatgaattggagcttcgtggcagatgagaacggttaggtaaggaaagacagccagataacaggagactcatgactctatcattatgaatgttttctatttgagagacagctgtgaatccgaccttgaagaagagttatttgataaataatgatgtttaaaacagacactgtagccacaaagcaatttttgtttcattacgaaatgaatctggtttttattcaggcatatcttccttatgtggaaattcataactttaaaaacgaatcattgcatcactaagaactcttttcacagcattctcttaccccttccaagtacccttttcaatcaatgtgctttctccttccttcaattgcttctatgggcttgcagaatctgctgctgtgtttgttcctttgctgttctcctttaattgctgtctctgctgtgtctggttctcctcctttcttttggcccagactatttatttctaaaacccatcagcattctgtgagggttaggattcatttcagagaaactcaagggaattacctctgggtgatttttcagcccaggtatttggtgcagttaaaatgtcatttatttctctagacttgcatgatgttgtgcaaaacatgaaattaatcttaactacacaacattcaactcttgaaatttcaagacctttattaaaatgttgaaatagaattttcctttaaatatgttaatagaagagacttgttgctttccctatgtgataactttcttcaactcccacatcatctttcattacccaaagaaacacacctttgattttataacggaagtcaatggaaaaaaaacttgctatatagaaatacacatttacagtaaagttttttatgctgatattcactcagtaatagaatgtatacccatataatctattgttctagctttccatagatgtcaaaaatgttgtcagcctgatgctagaatatcactgctattagtgtgccatctagtggctgatgttgtgatattttccattctttgttgaggtagaagaggctttaagtgacatatggaaagtccagtgagattccttctttgatacaatgcagggatgacacagttgtataaagccaatggccaaatgttgagtcatctgatgatgtgtagaggatcgtttgtaagttcttacttagccaatataattaagaaatgaagctattacaagaacaattaaatatatttgttagctcgctgtatcatgatgcacaaaccatatgtgcattaaccatataccaagaaccagaatacaataaaatgcatttgaccctaaatttaaattagatttaattttactcttgttattcagatggtactttaggatcttataggtctaggctttgaatactaattctcattgtgtagtatacaaaaatgtatgtttgagctttctggttgcttggatttaaaactaaaagtggttttgtatttataaaggatcaaacctatcatgcatagtgtgagtggcagcatatccatcattttagttgattctttgtagtattataaccataatcgcatgatcttatatattgctttattccaatattaaagattgagagataatgataatgattttatcttttagttatagaattgccttcaaatgccttgttttataatcatctcaaagtcaaacaagagattcctttaatcgttacatcatttttcataggcaagtaatgagggactgaatggttttgctgttgaagacagaaggacaaaaaagtaaaatcatattctccaaacatatacagatagtattgaaaagaagtgtaagaattagttattgtatgtttgcccttggaaataacagttattattctgttattatttttaaacatctattttatttattattattaaaggagcagttatcactaatgcaatcatttcagaaaaattttctttaaagcaaacacaggaaaacagaaacaaaaaccacctccatttaattgagttcttagtatgtgccacgtgatttaaatactttacatacttttcttacttagtcctcacacaacctgataaagtttcattttataaaggaagaaaccaggctgagtcattgaataacttattttaagccacattgacagtaaagggcagcttctggataaaacctaagtgtgtccaattttgaagccgtgcttataaatgtgacaaaaaatactttataaccatgtcaggaaaacatgcattgtacctactactctacaaagtctagccaagagcagaactgacatgcattgtcttatttgccataggcaaatcaacaggaaagcgaagtataaacagttaactcagactagtatattacccagggttttatactggttaatctgccattattccagaggcaagactacaaatcacttggataacatgatcctgcaatgtcaaggtaggtaaataacttgtgagagtttttaaatgatgccatcaccactgcagaagagtatatttactccttctgctttccttaaaatggctagcattaggctctttattcagaaatttttatattataacataccttatcttatatcattatcttctcccaacaatctattaggccaacgtgctagatcagtgatgttactttaaggccctctcaatctttttgttgcaaacagaccactgtgccacgtaaagattaaagtgtaaagactgagacttcaagaataaattttaatgctgtgatcatataatatataaattttgccaaactactttttgagctgcatgctaattaaatacaatgcttaacaaccactgatatacacacacacacacacacacacacacacacacacacatagaactacttttacatagctaaaccaagaaatgggaaagcttgttagcttgtttctagattcctggattcataattcaagggcattgtgatagatctcctttgttgttcttcctatatccacccctccctccccaagccaatggaaccttaagttcgttcaggtggctgctgacatctttccctctgtcgagtatttatggatgggtttaaaccaatcgtgattcatcccagggccagggataaattatgattggtctaaaccagccttagtaatcttagtaatcttgtaactttgtctgggaatgaagtgacaaattttggtcaatgagatgaaagcagaagtttttgaatgagcctccagggcttgtctttctgattaacacagataacatagaaaagaacttttgtctttctgattaacattgataaacttacagaagacagcctttgcctttctcttctcttctgcctgcaatgaagacatagtccctggaggcacagcagacatttgtgaccataagatgacaagcctgaggacaaaagtcaacttttattttttgagacggagtctcatcctgtggcccaggctggaatacagtggcatgatctcggctcactgcaaccacatccccggttcaagggattctcatgtcttagcttccctagtagctgggaatacaggcatgcaccaccatgcccagctaatttttgtaattttaatagagacggggtatcaccatgttggccaggctgatctcgaactcctgacctcaggcgatctgcccacctgcacttcccaaagtgccaggattacaggcgtgagccatctcacctggacaaaagtcaattttctaaggatgatgcaacaggatgataggtctctgacagcatcgctgcgttcattgaatagctgtatcaggacgtttcttacctttggattccttgcaatgtgacaaaaagttttatttatataagctattgtttgtaggggtttctgttacttgcagcctcatgtattaggttgaaccatatgatatgttgtaaacaaaaatagttgaagcttagcagatttctatgattcaaccaattttatgaattgatgctgaattcaagaccctttcacttctccagcaatcaaaacctctccttttcctctctcctgccacctgataccacacaaaatagatctttatatatatatatttctgacatttaatcaatgatgtgctggtaaactagtttgttaggaggaaaagccctgatttgtactgtatttatggtataactactcccactatgtctcattttaagcttccagcttgaggtcactgaaaaaggagttggaaagaaatgctcgcaatcagctcttctgagctgctactacagccagctccagcatgccactgcccacgcattggccaaagctctgttacagtgtatgatggtcagagctaatgttagaaagtaatttattatccttactattattctctttgtagcattgagacaaagatacaagaaaaatataatatatccaataattatatgatatatatgctaagtacatattatgtacacataaaataattataaaatacaataattatatcatataattaggatatggggaaattgacaagataaatgtagatctttgccctctgattcatttagatctagtaaaaaaaactaaagaaaatgtgtcagagtagccaccaaggagacataaaatagtatgaatttttaccaacaaaataacttataattttgatataattataattctacattatggctttattataatttataagaatatataattttaccaacaaattaattaatatgaatttttaccaactagctcttctattgcctaacttttatcagttatctctaatgggtaagaaagaaaaccaagatatccttcactggttattcattttttgaaaaagctgtattctgttgcagttaaagaagatgaagcatttgacttccatttgggacagtgacctttataaaataccgccctccctcccccaaaccctcagcccccaaactcattttctctagctgttgaatgccaaaaatccatttagttttcaaacattgccttttttctattagttttaggtagctggtccaagaaatgattgagattcttcccagtttaaacttaagatgcttgaatgtactgccagtaccaaatgaaggtctctgcattcttcatcaccctgtgcccagtctccgtcttttatcatcttcttttaacaatcttagtaatcccaaataaagtgaaatggaacatattaatagttactcttggggaattttttttggactggagttgatatataactgtggctggattatcaacatggactatcctgtctggagagacaactcaatattaataatgcagattcgagcattcaatgatcctatactttgtcaagccagaaaactgtgaaccaacctagatctgtcctctcactcaacctccaagtctaatcagtcaatagaaaaaataacaaatatatactgagcacttactgtatggcaagcagagagttaaatgctcttcacctattattttatataatctccacaatcatccactgtgttgtgttactacacccattttatagatgacaaaactgagatacaaataagctaagcaactcatccaaagtcatggcactgcggtagagcctgcaaaatttgaaccccagcagcctatcttcagggcataccatgtttactatgttagcagaattataatagattctcctgcttaattacttctcaaataagtttgtcccttcctcaatatacctactgacttaacagtagttagaatcatcgtgagaccttgcctggatttactgtgatagtctcctaactgaactccttgtctctggtcttttccccactctaatgcatcctctacctagatgacagagtgcttttgccaaactatagacctgattaagctcctcactgtagccttcaggataaagctgaaacgtcatctcttaataaccctgactctgtgcgtagtggaccctgccttcctttgtccccatttccctgcacatctcgacagggcagccctactaaacagcctgaattttcccaaacatatcatcttctcacagcaacagcttccttcggacataccttgctttctgcccaaaatgtgctgactccgtttttttcttctatgtggctaatttctagcagtcctgcaaatccctagtgaaggagcatctctcagccctctactattgatcacagtatgctggccatggtcctcatcatagctgtcctcaaagagctctcagttcaggaggcagacaagtaaaccaataatccaaacaagtgggcaacagctgttatcaagccacagatcttaatattctataaagcgtaatcttatagcattcacaaagaaaaacatcattatttaaattgttatgttttagacatgaaaaacactttgactagtcaaaaagttttaggcaggccaggcgcagtggctcatgcctgtaaacccagcactttgggaggcagaggcaggtggatcacctgaggtcaggagtttgagaccagcctagccaacatggtgaaaccccgcctctactaaaactacagaaattagccgggcatggtgtcacacacctgtagttccagctatttgggaggctgaggcaggagaatcacttgaacccaggaggcagaggcaaagattacagtgaactgacaccatgccgctgcactccagcgtgggcaacagagtgaaactctgtcaaacaacagcaacaacaacaaagtcttaggccttggctgctctgtctatggagtagccatccttttgtttctttacttctctaataaacttgctcttactttacctatggactcgccccaaattctttcttgcatgagctccaagaagcctctcttggggtctggatcaggaccgctttccagtaacatcttcctggcaaaccacagagggactatacggaagagacccaaacccaaaggaaaattatctgctcagcaccacttgcctgactttgcgtaagtggtagagtacattttatcctgggtaaaggacggaacaaggctagagacccaacttaggacatttagagttcttcctaagatttagggggttagggacctcccttggtaaagtccctgttggttaaaaatggatttggcactacaggatattaactgctattccctttggaaaaagttttagctatgatgcgtgtttctagatgtatctgtgctattctcttcatttggagtatggtaaaatattcttacagcagacataattttaaggaaaatgtatttccctcagcacttgtaactttttgtttatttatttattggatgttcttgctttaatttctttaaaaagcaaaaggtacgaaaatagccataaaaacgatatcaaagggcactttattttttgaaatgaactaagtgctacatgttactctacttcatgagttattgagatttaatcctggacgtgaagtagggtgtggagagtgattgactgtagtagaagaagcaatacacttcatgggttggcagtgctggaataagattatctacaattaaatgagaagtaagatagtccaaactggaaacagtgtgtgaggttaatctgcattcctaggttagactctgacagattatgaggctcccccacttaatgcccctcacacttctctctctcaatactcattttgatatttaatcttttgtgcagccaatcaattgattagtaatttgcttgtgtacattaaaggccaggagaaagaagttgcactataccaaaaccatgtcccactttaaaaggtacctagatatagattgtccaaaacatttttacttaaagtatgctcaggaagtgttgagtaagagacaatataattgaccaacgtatgggcattctttggaagccaaggagagaagaaagcagacggtaacaaacggataagaaccataagctttcccctactatagaaagtcagaaatacagggaggctgaggcaggagaattgcttgaaccctagaagcggagtttgcagtgagccgagatcttgccactggactccatcctgggtgacagagtgagactccatctcaaaaaaaaaaaaaagaaagaaagaaagtcagaaatgcaaatatttatgaagtaatgtagaagttgcagttttcagaaaatgtttagtcttaaaaccttttgcaagactgcaaccttgtacatgttttggctggatattagctactggtacttgaaatctagtctcatcttcctttgtatgccctctgtattttaaagactagacatctaaaaaccacattttttaaagtcacttggagcaaaggttttaaatgtgatttgggttctgctaataatacgcagttggcccttcatatccatgggttctgaatctgtggattcagccgattgcagacctaaaataggaaaaataaaatttctccaagtccaaaaggcaaaacttgaaattgccacatgccatgtactagactaaatccatgtcaagaaagtaatgtttagatattgcattaggtattataagtaatctagatatgacttgaagtatatgagaggatgtgtgttggttatatgtaaatattatgacattttatatgaagggcttgagcattcatggatactggcatccatgaggagtcctggaaccaattgccatgaatagcaagggacaattgtgtgttcgtatatatctagaaagtagaattgtgaggaagtccagctttgtagctatgaacgctgacaagcaagtttgccaaaacataagtgcctgtggtagctggactccaggttctcatgtctagttttcagcttcatgagtgtgagcagctgtgatggcaatagcaagagcggcaatggtggttaaacctgaaacccatagttcgatggtagtcccataacctttcaatgattttgtaagtgtttaattgtctacattaaattccctcctaattgaaaaatctaaatagatttatatttcatgccctgaatgctaatatgacatccaaacagcaacttgaagaagcccaatttattgaaaaaaaaaacaacctataattcaacatctgtgactaatcaagatatgactaactctgccatacctccagtattcaaggtcaggagacagagtccaaaactggcattaagggttactgcaggtctatttatgcttttgatacttccatatacatcctgtggtttgaagtgtgtgaggcagaaactgcattgaatagggtatgggagaaatctatgtttatggaaagaatgacctctgaattaatgaaggaccattataggaaactgtgttttttacggtcattggtattctcctcttctcccttcatcatcttatctgctagatcttccttttccagacctctaaatgttgaagtattccagggtccataccttggatatctctctgcacctatactcactctttcagtaattgaatctggttatatggctgtaaatgacatccttatgatgacgactataagtcctcaaagtccgacacattctacttcaccacatggttagtttcttcatggatgaagttgggaagaggattgtaggaaaaatcatattaacttcagaaatggggcagatagctgggcatggtggttcacacctgtaatcccaatactttgggagtctgaggcaggtggatttcttgagctcaggagttcaagaccagtctgggcaacatggtgaaacctgtctctacaaaacatatgagagttagctgggtgtggtggcacatgcctgtagtgtcagctgctcaggaagctgaggtaggaggatcacctgagcctgggaggtcaaggctgcggtaagcatgattgtaccactgctgcactccagcctgggtgacagagtgagaccctgtctctaacaacaaaaaagaaaataaagaaaaaaaaatgaagctgatagaatagaatgtagtcatcagattagaggtcagatgagagagagtcctgctagttttaccattatgtacttgcataatacatattcagttaggttaaaacactgaactgaatcaacgagaggacgaagtaatagtttggatctatgtctctgcccaaatctcatgtcaaattttaatccccaattggaggtggggccttgtaggaggtaactggatcatggggacagtttctcatgaatggtttagcaccctccccgttggtgccattcttgtgatagagttctcatgagatctggttgtttaaaagtgtgtggcacctccccactctctctattcctcctgttccagccatgtaagacgtgcctgcttccccttcaccttctgccatgattgtaagtttcccaaggcctcaccagaagcagaagcctgtatagcctgcagaaccatgagccaattaaacctcttttctttataaattactcagtctcaagtatttctttatagcagtgagagaacggactaatacacaaaagttatgcatgtgcaaaactgaagtcagtattttgctttctgcttactgtctctttcataacattctttagtatgtacaaaatactgggttcaggagtccattgtattctggctggcggccccataacgttgaattatggcatcttacctatctgccaattttctatgcttgattttctctacctttgaccatcattatacttatcaaaattgtgtctattccttcagagaactgtttttgtttaaatatcctgaaggaaagcaatcctaaaacatagtcactctaaagaatgaaacattcttaatagtttgatgtatcatttctctcagaatttatattttttacagggaacactgctttgtgctttgattttgtgtaggcatcataattgtggaaggcctctaagaaccaaaactgtctacctgatagtctgaacagtgagaactgaaaacacatctacatctatattagcaagacttcgcaattcctctgacttcaccaacataactttattttttcaggagtcttctgcccaggcatatggcttgaatgttcactacaggaacttcccaaaagactcatcctctcttcagtggaaaacgtcaaccaacagcttgcacgtaagattctttgaatccctcgccttagccatcagtcttggactattgtatcctgatccttacccaatcctgaaccccatttttaaagacccacctgaaatcacactttcattttccaataagttggggtttcttccccccactcggaaacaatcccaaagtttgtgaggtggtgcccacccttaccaaggtaagtaataaactatggtttgtcttgtcagtgggttatgttggggtcagtggttaagctctttggggaaccagcttttgacagctccaaaatcttgcattcagaagtctgtaactattgaaaggagaagtctgtacctgtgaaccaaaaacatgtgagacaggtctcaatcaatttagaaagtttattttgccaaggctaaggacacacttgtgacacaaccttgggaggtccaggtgacaggtgcccaaggtggttggggtacagcttggttttatagattttagggagacatgagacatcaatcaatatgtgtaagatgtacattggctcagtctggaaaggcgggataacttgtatagggggcttccagatcatacgtagataggagacaaatggttgcattcttttgagtctttgatcagcctttcactgaatacacaatctgcatgtgagactcgggtagaggaatagttacttaagccttagtctggctcaatgaatctgtattttataggtgaaggaggtatatagcttttaaaaatctttgtagttatcttacttagaaataaaatgggaggcaggtttgcctgatgaagtttccagcttgacttttctttttggcttagtgattggggtcctgagatttattttcctttcacaaccttaaaatcatcagacactgcataaatgtgaaggcctaggctgatttttttttgaactggatattatgaaagatacaaaggttgaggctataaacttcaaagctgccaggatagactaaaacttcataaccaatccacaagatgccagcattccatcagtgctcaaaaatccaagaacgcacatgggtcattacagtgttcatgttatttgaaaggaaatgcaaatatggtaacatttcatttggaaaaagaaaaagaatatatatgaactaccacaagttttccaatatctgtctttaaactcctaagagctaatatgtaacaaatttaaagagagaatatttggtgagagaaggtgggggttttcctattcagcttaatggtaatttttagaatttcctattcaagaagccactagatggccctaaagcccacctttatcaaaacacacacacagagagctggcaagacgaagaagaaaaaaatttagccatttgctcataagttaaaactgaaaaaagataattcatacaaagacataaggtctatcctgtgtttacttaaggttttaagaaaatcaagttttgctacaaaacttggagcatttttctttctgggaacatataagtacatatcataataaccaacttctctacaacatgcatgatttttgatggtgctaatatactagtggttagattttccaagattgatcgaattattagagcttctaagcagaaattacatagtaaagaaatccaatacataagaaatagtgaacttgagtgagattacaactcagctgagttgtttgatcagcataagaaacagtactacacagcctctttcacaaccatgtgctgacatagtgcacagagtgttcctggctcccgtggcctcccgtatcctaccctggcacttccattcctcactggttcctgcgtttctgtctgccgctctgcagggacaaggactgtggctctcttgtgcaaggttacctctccatcacctattgtaactggtcattggagcatttctggcatgccagtgccaactatagtgtgcttaaaacatatccaccaaagttttacaccgtacttagaagtgttccatgttatttgtatttagagctataaatcagttgatttattcaaatcagaaatacaaatgagataaagggacaaagttccacaattctgctgattcaaagtaaaaataaggtattagtccaggtagagtggaaagcacaaattcatcagcagtaacaagtggaagccaggcgtgtccatgagaacagtggaagtctcctgggaattaggagacatcttggagaagacagtgggtttttccacagggcataaaatgggtattcaagccaatctgattaaaatcttcagaggcaaaagaccctagcagacccaaagttattatataagcattttaaaatagaaactgcatagagaagtggcagctgaaatacaaatgacaaaaagcctttgggtaaattggctcaggagctttgtgatgctaaagaaaatggaatcagccacaggcaacagagaaggcagatggggaaagacacagtcctgaggaataacctttgcaagcacatctgcgacgtgacacagccactgaacattccctgaatacagccgataagatcaagagcgagcatttcttaatcagtcattgctctagagtcttcaacacaaatgcctagatttttctggtaaaagaaaagctcattccatgagtgagcagcaagttaataaggagagaaaaattatcctgcccttttctctgttttgtttttcctatcactccttctcctattaaggttaattttatgtttgagaagagcatgtgttttcattatcaggaaaaaaatgtctgtttttaaaatgtattagcatattttatttgtttttgtcataatgcacccagaaataaaagaaaccacaaaagtccatgtgatgactcatgagtttttatttctcttgggtatacctggtttccttacaggagcgtcacccttctcctgactgaaccagacacctggggaaatctttccatagcactggtttctgatttgcaagttcactcatcacaatttatcaaatgaagtgggttcactcatctaacttctactgaatgcctagtatatgctgtagatatagaaataaataagcccaaagtcctacctacaaaaaagtcatgactactaaaaaagaaataaaactgtgattataagatactgtggtaaatgttgcaattaaggttcacatcgtgtaaagctttgggctgcatgctatatttatttctcaggaatccattccaaggcaagaaaacccaaccaatactcagctaaacaaaaagacatttatttgtctcagacaacacaaaagccagggaggtaggcagtccagggctgggaaaatagctccctaatgtatcagggacccaggctcgtctgtctttaccactccttcaccaccatccttggcttggaggcatttgtcttcatatttgctgccttgtggttgtaaggtggctgctacattttgaaacatcacatctgttcatgttccaggcagggagaagggggaagaacaaagggcaaaatgagtcatgttagcccattttttgcttttttatcaggaaaacaaaaaatttcccagagaccccagcacatagacattgttttatcttatccgtcagagctgtgtcacaaagccaccctggccagaaggtggctagcgaaaagcgggcatgggataggaattaggctggcggacccacagcgtgagacactaatgtaccccacatgctcctgttgctatcttctacccatttgaacaactactgtcctctctattctgcatgctggctaggagagcctaggcaacaaacagtccacaggtatgcctatggttactgctatttcaacagagttcactggagtaagatgatgagggaggaagttcatctttttgaggatttaccccctgtttacattcagtctttccatgttgaactagaaattcaaagaggaggcatcatgtctccttaaatatatatatctttcccctctttggagatcaggatctgttttagactgtggggaattcagtagccccaactctgttttcaggtgaggtaactgaaacctccctgcttcagcagtgcgattcccactacctgtttacaagagaactgaatatcccctcccctagggatcctctgctggaactccgattaccccataagttgctgttaaatcagtgaatggcattcattaggcacatatcatgtgacaagcagtgtatcatattcctctaattcttcaaaaacaactttatgagagaggtactaacgtcatctatttaaccatgaggaagtcaaagcacacagaagttaagtcatttgtccaaggttacatggctaatatgcagtgaggcagggattcaaacccaggcagttggcttcttatggagaactgggcaagggatcttagtactaaatcagctaacctcatctagtggaaatgtcattctcagagttcttcaggctgcagacaccaggcttctgtaactagctctaggtcagtttggaaaggtgcatggtaaacaccaataatttaggaatataaggcagcttaagattttaattcattcattcttcaataaatatttattgaacccctgaaacgtgctaggtttcactccatggcctggggattcaactatgggcaagagagcatggtcccttacctgaaagtttactgtttctagggaagacaaggaattaagtaaaatttgatgagtaatatactgagaaaaattcaaggtactatacaagtgtattatagaagacattcgtattttgggggtggaggtggggagtttgtcggggagtgcttttttttttttttttttttttttttaggcagagtctcactctgttacccaggctggagtgcagtggtgcaatcttggctcactgcagcctccatctactgggttcaagcgattctcttgcctcagcctctcaagtagctgggattacaagtgcgcaccaccatgcctagttaatttttgtatttttagtagagatggggtttcaccatgttggccaggctggtctcgaactcctgaccccaagtcatctgcccgcttcagcctcccaaactgctgggattacaggcataagccaccacgccaggccatcagggagtacttctaagaggaagtaacatttgagttctctgatatgttgcagttagccagacaaagatcctgactggaaagattctgactggaaagaagaggtatgggtgtttgtgtagttctagagcggggaaaacctagtttgttgaagaactggaatgaattgcaaaaccccctgaagtaaaagatacctgaagaggtgggcagaagtggagtcatgaagagctctgtgaccttctaagccaacttaaagtcaagtattttgtttatggatttaattttttttacagttataatcacaatgtccccagtaaagaaaccataatatagctcatgttgtttttgttcttaattagcttgttaacttcatggtacattgaccacttaaaaatgagatttattcttctcattaactttaaaatgtttggaaatgaattgcttaatatcagaaaacatttcttatgctttttgagagaggaaaataggtgagcgtctatttattatctggtgatgtctatgtgctggagtcttggttctccctatttcatgattcctgataaaagacttatgcctccgttcttgtagcccattcagagaccaggtttaggcgtgagtgccaccaaacaaattagagtttttgccagagtatggaattccaagtcttattttcaggcccctaggcatctgtgccaattgtgtgagttgcactaacgactagtaagtgagtggtcattgctctgctaaatcttggatatacaaatttagggggtctcaacacatgaacaggatggggaacaggcagagaggcaaagctgtgtttgtgaggaaccaagagaggcaaggcttgattcctgagttgtttggatatatgctgtccagaaagtggggtgaatatagtaccccatcctgaggagattggagctctgtgcagccaagagaaatggccccataacaggtagccagaagctcagggctctctattcacagccagaatagaggctgtcacaatcctggggaaatttgttgatttctttattcattcatccaataaatatgccatagagacagggcagtaaaacacacaatgacaacaacaaaacagacagaaaactctgccttcatgaaacttatactctagtgatgcagatagaatccagtaatatgtagtgaaaaaaaaaattcatgaccacactgggtttactccaagaatgcaattttgtattttggtcttatgtgaaaaaatcagtcaaagaatgaaagagaataattacatgtcacttcaatagttgcacaaaaaaaattagtaaaattcaatacccaagcatgatttgaaaaaacaaacactcttagcaaactcgaactataagggaattttcttaacctaattaaggatatttacaaaagaacctttgatgaatatcatgcttaatagtaaaatgttgaaagctttctttttaggatttataacaagacaagcattgtcttttattactacttttattcaatgtgcaaaattgaaggacaccgaaggccctggccagtgcagtatgaaagaaaaataaataaatgacaaagttattggaaataaagaaataaaacatcattattcacaaatatgattatatctgtggaaaactgtgtgaaaataaataaaatttaaaagctcttggaaccctgaaaatattttaggctttgagagatatgtgactgtgatctgaatcacatgtagttacaacctctattctcagattatagattaacctgctttcttgtttttcttgttctgtgcaatgactagagagaattaaacaatgccaaagacaaaacctcctgccttcttcattaatgacccttgttatagattaacttccccatttttgtcttgatttgctagataagatgacagaaaactcatgactattactccctctggaaaaaaaaaaaagaaagaaagaaaaaaaaaagttaaatgtacccttcccagaataaacacagcctataaccaatcaaattgctgtaactatgcaccaaccttatatggaaaaatgttgtaatcctcctaaaaactccctgtctctgcctacataaatgaaaccttaagttccttacttcggcatacttactctagtcctctgcagttggtgtttccaggtaggctatcttcaaatgttgctcttgaatcaactatccttaaattagattcttaacattttattattttaggctgacagttgaaaagaacctacagccaaatcaaaagaattcataagtgagtttagcaaagttactagaaacaatatttaaaaatttatttgaatttttctatacaagcaataaaaaaaacaaaaagatgttatttataacagcttcaaaaatatcaaataactaaaaataagtctagcaaaagatatgcaaggccaccatgccaaaaactataagacactattaagataaaaaaaataagacctaaatactctaactgatagaaaagactaattcatggattgcagaaatcaaattgtaaaggataattcttcccagatggatctagatatccaatgtaaacacctttgattatttttttttaaatgaaacttgacaagtgagtctacatttaactagaaattccaagggtcaatagctaagaaatgttttacacgagtaacagtggattctgattatcaagactataatgcttcggtagtaatacattggcacaagttaagagattggatgaggattataaggatagacaagttaaccaatgaaatagaaagagagccaaaaacagacttaaccacacatgggtgcttgatttatgagaaaggtggtatcatagaccagtggggagaaagggatcttgttgataaataatattgggacaattgaatatccatattaagaaaaaatttgacccctgcctgacacaataaatagatattaattttaaatttttaggcataaatatgaaagaaaaaagcaaaaaatattaagatgatacagtaagagaatagtttcatgattttagagtaagaaaagaattaaaataggacataagaaacgctaactataaaggaaccaagccacatacgtacattgaaattattaacttctgtttgccaaaagacacctttaaaaacgaaaagggaagagcagagtggaagaaaatatttacaacacaaacaaaagttaaaagtctcttacctcaaatatataaataacttctacaaattaataagaaaagattaacaattcagtagaacaatgagtcagagcaaatcacaagaggctattcaaatggccaataaatcctatgatgttaaaattcctcagaaacaatcaaaaagtgaaaaacaaactggacccagaagagcagaagcctgtggttgaaaggaaaacagagcagggagaaggaagatcaggacagtattgagagggtataccagcactgggttaaaacaatctgggtgacgttcagtaaagctccattatttttaactgggatttttggggccagccactgaagtgggaaggtttatccctttcctgtgggtctttggattttcattaaatctttccctattcccttaaacaaattttgcccttctgtcatctagtccacttcctctctgttggtggctaaatgggatcatcctggaggaaacttaaggctatttcatttcccattttaagtgccttttggggctgaacagagatctgcagttgatttgttagctggcagaagtgtggacagtgaaaattgcaaattgattttttcttgaagggtcagctattggctcacattttcaggtaatcagttatgatgctatcaaataaagccacttgcaatagtggccatctaataataacaaatgtagattaccccacacattatttaactctctaaaacactagcttgtggctgcaggtacaaaactccagtgagaaaatcttgcaaaaacatttggtgcaaaatcaatgataaaatctttcacagcattttaagagtaactgtaagaagaaagcaattgtagttattcatttaatcgtttttctaaatagagtctacacatgagctgaactcttcatttggaatgaaataatccttttgaaaattttactctgcattagattttatcccaagtggcccaagaagcactatctaatatgactaacaaccacacatctataactagtacaactccaactataactttgtaggacctattgaagtggttgacttatgcttattaaaatattaaataagaatgaaaccagtcattctttggaagattccaaataatgttgtagaaacttctattcatttatatattccaagatatcttccataaagtggataagatttttaaaaagatgtaaaaggaccaattttgagtgtggcccaaccagactcaattctggaaatcaattcttacacattatcaattattcatattaatatatcattatatatatataactttttacactgatttatttattttatttgacactataaaataaagcaacctaaaataaagtcagtattgccttggagaaatattctgttaatctttccattctgaaaatgaatgccataggagaatgacgaacaacagaaaatttattagcgtaatgaaagaaaatttaaagtactcccctaaatgcatagaagtagactatgccctgaaactgtttttgagtagaaactttctgaatattgagttacaatggtgcatttgatctaacaaaaaagatgaaaatataaagaattaattgtctcaattccagagaatattgtatatagttgtgtatatagttgtgaaaaaactggacagcacttttttcatattagttcacattcacaaagttcataacaatacaatatgactcatagttgttcattactaggaccttgaactacaaagaaacccgcagaatattccttggcagctctggcttcatggatatatgactttgcattcatacacgaatcttaagcttggaaaatcagctgagcgcagtggctcacacctgtaattctagtactttgagaggcagaggtgggcaaatcacctgaggtccggagttcaagaccagcctggccaacatggtgaaaccccatctctacaaaaaatacaaaaattagccaggcatgatggtgtgcgcctataatcatagctattcaggaggctgaggtgggagaatcacttgaacctgggaggtggaagttgcagtgagccaagattgtgccactgcactccagcctgagcaacagagcaagaccctgtcaagaaagaaagagagagagagagagagagaaagagaaagaaagaaagaaagagaaagaaagaaagaaagaaagaaagaaagaaagaaagaaagaaagaaaagaaagaaagaaagaaagaaagaaagaaaaaaagaaagaaaagagaccctgcagtacgaaaactgaactgtgatttatccatatgttatgcccctctatttcataaatattaagaaaaatcattttgactgtgattaaatgtatatatactgagccaaatatttttctttcaactattttcccttccttcccccttcttccttggattttttttctccttaacattgactatggtctatatatatgtgtgtgtaggtctagtactgagctctctatgatgttccatttacctttccttgtgccatatacaatgtcttaattactatagctttataataaagtttgatatttgatcatacaagttcccatcttgttctttagaactgtcttggttatttttggtcctttgctagtctatataaattttaaaatcaacttgtgatgttgggattctaggagtgttaatcaattcatgaaaattaatgtcaatacaatattaaatctgactatccatgaatatggtatatctcttcatttgtttaggttttatttaatgtcgtttaataaagctttataatttttaccagatatgggcttacacatctcccactagattttttttctcttggataaaatatttatttttattgtaatttaaaatagtataaatatttttaaagttttttactttttaaatatttgtttacagttcatttttgaggtaaatatacatacagtaaaatagacaaatacaagtgcacaatttgttgaattttgacaaatgcaaacaaacgtagaggtaagaatgttttacatagtataatctttttaataacatttttagctgatcattgctggtgtataaaaatgcaatttcctttttattttgtagacaattatactacccataaataatgaccagtttgttttgtttcattctaactcctaattccttttattttacttttttattcacattactataccatctaggccatttagtagagtgttaaacaaatgtagtaataataaacatctttacctattttatattaaacttaaaatttttcaccattaagtataatattgctgtagttttttgataatatttacacgtttaagaaatttttcttccattattagtttgcttaagattttctaaaccataaacggatattaaattttatctaatacaatgtgtctacttagctcattatatagctttcattctttaatatgttaatggtgcagcggggtgcggtggctcacgcctgtaaccccagcactttgggaggctgaggtgagtggatcacaaggtcaggaattcaagaccagcctggccaacatggtgaaactcaatctctactaaaaatacaaaaattagctgggcgcagtggcaggtgcctgtaatcccagctacttgggaggctgagacaggtgaatcacttgaacccaggaggcagagtttgctgtgagcccagatcgtgccactgcactctagtctgggagacagagtgggactccatctgaaaaaaaaaaaaaaaaaaagaaatatgttaatggggcatgagttggttagccaactgcacagtttgaggtggcatagtccacgcaagactgtcctcacttttgacagcaattgcaagtttaggggcttcctaaaaccaccttcaggttacctaatccacaaggactcctggaactcactaaaagttgttataatccaggttagagtgtattacaggaaggatacagattaaagtcagtcaaggaggggcacctagagcagagtccaggaaaagtatcaaacatgtagcttctgtttttctttctccatggagtcctggacacattacttttcaaatatcaaagtataacaatgtgcacaaaatattgctaatgaggaaagctcagcagagccaggtgttcagactttttattgaggctccatgatgtagacatgggcgattgccaatgtggctgatttcaatcttcagcctccaccctctccagacatgacccaaatcccccacgctaaatcacatttctggtctttctggtgtagccattctccatcttaaatcatatttttagacaatctggtgacccaaggctcacagccaaacaaagacactcctatcaaccatgatattccatcaatttacccatcacctctcagaagccaaggacaaagaccagacttcttttcggacaaagttgaattctttactatgtgtggggtgaataacataatttaactttctaatattaaatcaactttgtattcctgaaatgaattcaacttgataataaaatatttacttttttatacattatataatttggctttataagattttgtttaggatttttatatctatgttcatgaataagactggtctgtaagttttctactttatgctgtccttgcctagttttgctatcaagattatgctaaccttataaaataagtttggggatgtttcctcctcttctataacctaaaagagtttttgtaaaattgaaattattatttattaaatatttggttgaacttgtcctttagtaattggtagtacatattaaggaaatacgcacatcaatggacatgttcaggaaaaatgagtgttgaattttatctctttttttttttacatattttaagattaccttataatttttttctttacaatgttaatgtcatatattcataggtcttaaatgttgaaccatttactatctttttgttttgtgtgttgctggacttgatttgcaaatatttttatgaaataatatttataagtataattgacctactatttttatcttgcattactcttattttattatcaaaattatactaaatgtataaataaactaaataatttttttctttttttctatagtagttcgtataaaataaagattgtttcttaaagatttagtactgccataaccaattactacaaactaggtggcttaaaatgctagtaatttattctctcacacatctggaggccagacttccaaaatcaaggtgtcagcagggttaggttagttccttctggaagctttaagggaaaaacattccatgcttctctactagtttctagtgttgctggcatgtcttggagttttttggcttgtggtagcgtagttccaatatctgcctccagtttcccatcaccttctttcctgtgtgtccctctatgtcatctcttcttacaaggacaacagttattggatttaaaattcaacctaaatccaggatgatttcatcttaagatccttaacaaattatatctacaaagaccttactggcaaaaacatgacattttaaagtttgggtgcacgttactttgtatgggatactattcaatcccttccaattgcctgaaatacaaaaatatgccaggtataattccaaaatataaaagaaaaacagtcttgctaagtgagacttttgaattacttgatactttgtcttggatctgaggaaatgaagtatatttgaggtataattgctttaaaaagtactccagtggataaaagtaggtgagtagagaagaaagagtgttaacagccattagtggtggcttctggaaaggacaattactgatcagaccatctgttaattctaccagacagtttaatgtgcaaatgtaaataaaactaataacatctccatggaaaattaaaaaatgcttaaccaacattgatttgatattgagagtcttcgtctgttttgtgttgctgtaacagaatatgcaagactaggtaatttgtacaggacagaaatttatttctcacagttctggaggctggaaagtctaagattaaggtaccaataggtttggtgtctgaggagggtccagtctccactgccaagatgatgccttgaatgctgcatcctccagaggggagaaactctcttctttacatgacaggagagcagaagagagagaacccactcttgaaagttattttggtagttgcatcaatcattcataaaggtagagtcctcacagcctaaacatctctcattaagccccacctctcaacacgattgcattggggattaagattccagtacattaatttggaggggccaaaacattcaaactaaaatattgaatttctgctagaactaataactgtgttagatgaataatagaaagtagatcagtaccaataagcatttcactcaagtcagccccaacccctttcagctgcaaataatttagagtgatttattggcatgatttaactttaatcagaaattgagaagtgagtagctatattgtaatatttaataatatatttaaagatataattataccaacctcctagattattgtctcttgttactatgtttctctggaagcatttttcttggatttcgtaaaaggttctctagaagaggaagtagtctagagaacaaactgaaaacaatttgcaattgtttaaaagcaacatttcacaaattctagttataagaacttccaacaaaaatcactgtcagaaaaaaatatatgggcatcctctggggcctctatgggatggagattgttggaatccttttcatctctaagattctgtgaagtctctgagttatgaaagagtgagctgagaatctcagcattcccaggtgaagggaactaaggcaggtgatttagcaatgtggagggtcatgcttcaagatcttgttggaaacccatatcccaaggaaaaaggtggcccaggtaacaataacacagaacaaaataatagaaagataccagttttgcaggcaggtagatcagtctttgaatcctagctcctccatctctgtgtctctgttctgtcatataccttaattaaaattcaaatgagataacatatgcaaagtacctgaacattaggtgcacaaaaaatggtaggtggtattaactgtgactaggaaagagaaacaaaattgctgcataaatggcaaaaattttggtcatcaattaaaactacttacagagaatgtatatacttttaagatttatgataatttttctcatcataaagaggactgtatcagcctaaaattatcataatatggtagttattttgcacatgtcaacatggcaacacccctagttgtgtgctgttcatgaaaatacatgctgttcatgctgcttctgagaaatagagttattataggtctttccctctccatttcacttctcaaacaaaagaatatttcatacatttgtatatgtgtttttttgtttttgtttgtttgtttgtttgttttgagacagggtctccttctgtcgccccagctggagtgcagtggtgtaatgacagctcactgcagcttcgacctcccaggctcaagcgatcctcccacttcagcctcccaattagctgggaccataggcacatgccaacatgttcagttttttactttatgtaggaacgaggtctcactatgttgcccaagctggtctcaaacttttgggctcaagtgatcctcctgccttggcttcccaaaatgctgggattaaaatcataagccactgcacctggccacatttttatgttaaagaaaatattctttctttctttgaaagaaatgcctaggaaaagtgtagtgtcattacttttaaaaattataatgttttcattcatattgagttatttagctttcttgctgcaagactttattgaaacaatatgatattggtgcctgatttttcaaatagttctgttgctttacatactttaaaaatataaaaatagcataacatttggtgagttgaactttaagggtagttttcttaaatttcataaattcatactattgggagacaattttccatgggtctctcaacatttcagcacacctggcagaagcactgattgccttttgtttacagcgtatcctttcaaggatgtttgtatagagaacaagcttgacagatagatagtgtttccctctggagcaaaagacaaccatgtatgctctctagtataataagtatttttctcattggagcaaaaaacaggtatgcttactgcccattataaaataggtcagagttcttctcctttaacataacccactgcttgtgcagatatcatctagccttttttctgatgccctccagaagttgagacttgaggaactgatacaaaatgctaataatctggctaccactgttgctgtgaataataaactatcctttgtctctgacccaggaatcttctgctttctaccagcatccatgagactgtggcagaataactagcttgcagatagggtacaaatatcagatgcgttgaagttcttgacaaatatctgaaacatttatttgatgaccgtattagtctgtactcatgctgctgataaaggcataaccaagactgggtaatttataaaggaaagaggtttaatggtctcacatttctacatggcaggggaggtcacacaatcatggcagaaggcaaaggaggagcaaggcacatcttacgtggtggcagccaagagagcgtgtggaggggaactcccatttgtaaaaccatcagatctcatgagacttattcactaccatgagaacagtatgggggaaactgcctccatgattcacttatctccaccttgcccctgcccttgacatatggggattattacaattcaaggtgagatttgggtggggacatggccaaaccatatcaatcactaacaaaaggaactaatcactaactaatcactaacaaaggaactaatcactaacaaaaggaatcccatgactaattcacattctagcatatctagagcaaagcagcaaagggcaagtgtgaccatttgtaaagttgtgagtatgtgtatgtgtgtatgtacagccagttgtctacttttagaagccaggagactatttaacacttcctagaacctgggatttttctgaaacaaagaatcagattgatattttatatcaacttttaaaaattcaaagaaatcaaaaccatagtacacagtatatacactaatgataagattatgcctaaaaacacgtaagagacaaaaataattataagcaataaaaaattttgagtcactctaatatggaagattggctataaaatcagctcataaagtaaaaattgcatatagtaaaatacatatgttgaaaatgcctttaatcacccatagagtatactgaccatacagattttttaaaacaaataatgcatttaatttatttgtcaatggctatgaaaactttaaaaccattcacatgttctttccataggttttggaacttctgcagttggttttctgacttaattgtagcccctgtgcaagtcatagcattggtggtgcagagaagtgtctactcaagctgtattgttaatttaacaaactttaaatgtatgcatgacatgacttcattttacccttaaatattttcatcattaaacaggagaagataaaaaataagccaacatattgaattttaaaaacaaccattaaacaaacttaacaaggaacaaaaaaacaaacaaagttaaagacagatattaatgaatcagaaaaaaaattggttgaattaacgaattcaaaagcaggtttcagaagatgataaaataaaatggaaaggttttgaaagctcaccaaacaactacaatataagccctgtgaaggcacagtacctggcctataaatacacaataaatattatttaaatgaatgaatacattttaaaaatcaggaataggaagagaaagaataagagtgagatgtttagtggccaagactaaaggtggtgcacataatttctgcccatatctcaggggccacagctcagtcacttggcttccctggacaaagcctgtttctgggaagaaaatgaaatgatttggttctctgcaatgcctggatattatttcctctcttgtattagtttgttctcactctgctataaagaagtgtgagactgggtaatttataaagaaatgtatacccagtgaaactgagtaatttataaataaaagaaatttaactggctcatagttccacaggctatacaggaagcatgacaccttctgggaaggcctcagaaaactttcaatcatggcagaaggtgaaggggaagcaggcatgtcttccatggctggagcaagaggaagagagaagtcgggagatgtcacacacttttatacaacccaatctcacaagcactcactcactagcatgaaagcagcactgagggggaagcctgtgtccatgatcaaatcacctcccaccaggcctcacctccaacattgaggagtacaattgaaaatgagatttgggtgtggacacagatccaaaccatatcattccacctctggaccctccaaatctcatgtccttctcatgttgcaaaatacaatcatcccttcccaacagtcccccaaaatcttaactcattccaacattaactcaaaagttcaaagtctcatctgagacaagccttgtctcttccacctatgagcctgtaaaatcaaaagccaattaattactaccaagatacaatgggtgggtgggtgggggtgggggataggcattgggtaaatagtcccattccagaagggagaaattggacaaaagaaagaggctacagtccctatgcaagtccagaacccagcagggcagtcattaattcttaaagctccaaaatgatctcctttgactccatttttcacatccagggcacactggtgcaaggggtgggctccgagagccttaggaagctcttactctgtgggtctgcaactgtacttgtggcttttccaggttcacaatgaaagctgttggtggctctaccattctgggctctgaaggacagtggccctcttcttacagcctcactaggtggtaccccagtggtgaccctgtgtggtggctaaaacccacattttccctccacactgccctagtaaaggttcttcatgagggctccacccctgtagcaggcctctgcctggacagcaaggttttttcatacatcctctgaaacctaggtggaggctcccaagtctcaactcttgcactctgttcacctgcaggcttaacaccatatggaatccaccaaggcttacagcttgcaccttctgaagcagtggcctgagtacctaggtccctttgagccatagctggagctggagcagctaagacacagggagcagtgtctcgaggttgcacagggcagtggggtcctgggcctggccctggcccacaaaaccattcttcactcctaggcctctgggcctgtgatgagagaggatgccatgaaggtctctgaaatcccttggaagccttttcccattgtcttggctatcagcatttggctcctttttacttatgcaaatttctgcagcctgcttgaattcctcccctaaaaatggtctcttcttttctatcacatgaccaggctgcaaattttctacacgtttatgctctgcttcccttttaaatataagttccggttttgggtcatttatttgtgcatgcatatgaacatatgctgttagaagcagccaggtcacacttgaatgctttgctgcttagaaatttcttccacaaggttgcggtgagccaagattacaccattgcactccagcctgggcaacaagagtgaaactccatctcaaaaaaaaaaaaaatttctgctaccagataccccaaatcatcactctcaagttcaaagttccacagatttctagagcagggacacaatgcttcaggttctttgctaatgcataacaaaagtgacctttgttccagttcccaataagttcctcatctccatctgagacctcattagcttggactttcttgtccatatcactatcagcatttcagtcacaagtcaagcagtccctaaggagttccaaactttccctcattttctgtcttcttctgagccctctacactgttccaacctctgcccattacccagttccaaagtcgttttcagattttcaggtatttatagtaatgccccactcctcagtaccaattttctgtactagtccattctcgcactgctataaagaaatacctgagactgggtaacttataaagaaaagaagtttaattggctcacagttccacaggctgtacaggaaacattatagcttcttgggatctaaacattctaaacctgtatcagtttcccctcaggaaactttcaatcatggtagaaggtgaaggagaagcagacacatcttacatagtcagagaaggaggaagagagagaaagcagagatgccacacacttttaaacagcctgatctcaggagcattcactcactatcacgaaatcagcaccaagtgggaaatccacccccatgatccagtcacctcccaccaatccccactggggactacaattgacatgaagattggtgtgaggacacaaattcaaaccatatcagttccctttcacctctaatcgtgttccttgtctgtagctctgttaggtctttaccacttgagattgtgtgcatcttttcacagtttatctttcccaaccagatggtaaggtccatgagaagagaaatcatgtcataacctaaatttcttgttgtaaacaacacccagcatggggctctgtgtgctcaaaaactcctcactcctacagagtgcatttcaatttacagagtgtcttcacagatttgtctcattgttgatttctgaagtggaagaccaatatttctgactttatgatatacgaatgcttggatgagctgcaaaaggttgagcaaagcaaatgtttccattccatctagttcagccacatagacataacctttttcgttctctctaaaataaactcaactgagtaatactacatttttcttttattactggtggcattttatttaaatgtttgcatccatattcctaagtgagatgatatttcctttttttgtgctatattttctatgttttgtatcagagttatcttagttagaaagtaataactccaagatggcagagtcattcacaggagccccaatctctgagtcttttcttgaaggacaactgccaggagagctgcctggctcaaattggattgtgacatgagtgagaaatggagttttattatgataagtcatattatggtaagtttgtcttgttatagtagctagcattgcttttcctgactcatagattcttgtcatctcaggtcctgccatcatcctaggtgacttctgtgtccacatcaatgacctttccaaaaccttagccattcctcttaacctcattaacatttgtaccttcatttcctctgctgccatttagtcacagccctagagcttgtcgtcccctagagcttcccaatcacatctattcttcaccctcatgtggttctcctatctacttttctgttagacctttcctgccctcaattccttcccatccatcttattctcaatggccatgagctcacttattcttgggctaatctatcacttccccttaactctcattaaacgaccttctctatttcacaaagaagatgtgatcttcaggcaaagagttctctcactccctacacagtcctccaaatcttgtttgtgtccacaccaatcctcttctccattcctctcctctgaaaaaaaaagagctgttcctcctcccttcccatgtactcactgccttccttcctgctgtgtcacgcctttgctccactctttgtgccctgtctcagctagatcttcattctgtcctctactggtttctccaccctggcctttagatatgcccaaacttgaacttcacagctctgtctttattctgcatccttctgcatagtcaaggctctattttttgtttaccatcttcccatccaaacttcttgaaagggaagcctgcagtttcttatttttcatgcattcctcagctccccactgccatttgtctccctcctccacttaacgatttatgccaaggtaatctgttcctagatctagtggacatttctaggctttctctctcttgatctctgaagtatctggccctactggacactgtctctccttctcttcatttggctttagtgatactatcttctcctctggatttgctctcatctctttggtccctccttttctggctcctgctcttccaactgcttaaacattgctgtctccactgttccatcctcttctgttctcttgccacatattctctgatttatttcatacactcccatgtcttgaattcctaactaaatgcttatggccagaatctaaatctctggctcagctgtatcttctgagctccaggcatcttcatccatctttgtactaatctttcttctttgatgccctacaggctgcttaaactcaacatgaccaaaacaaaacaaaacaaactttcttctccttcaaacatcttagagaattgcatccttttctgcaccacctaagccataagttataaagtcagcctccatgctctcttctaccctcctccatctaatctactcaccgatctgatcaatcctagggtctaaataactctcaaatatatccccctctccatctccatcactacttctcaattaggcctgcataatttcttcccaattagtcttataatgccctaactcgtctgcctcttcctctttactgcagtcagaaagctcttattaaattacaaatctactcataccactccagctgctaaaatctgttcaaagaaaaattagacaaatttaatttaatagagtctaattgagcaaagaataattcacaaatcaaatagcctcctgaaacggaataggctgaaagagtctccagcactgccttgtgatagaaaaagaaaaaggaaagtgctgtacagaaacagaagtgaggtacggaaatggctggattggttacagcttggcatttcccttatttgaatataatttgaagagttggccacatttgattagccaaaacttggagattggcacaattgtaggttacagcctgtttacacattcggttaggttacagctcactaggtaggagaaacctttaggctgaagttaaaatacgcaaggagggagctttagatgaagcttaatttaacaaacccttcacaggccaaccacatagctttcagaacaaggtggaaatgatgggcatggcacatttcatactgagatctgcctgctttccaggcttcccctctgcacagcccctgcctctacccatcttcaactgtggtctggcaaaagcaaactattttcaatttcctgaatgcacttcattctctccagtttcttagcctttaaccatactattctctcagactggactgatatccccatcttcccatgccacttcactttacaaactgtttcttcagggcttaccctgggatactatatccttaggaagtcttccctagacattcagcaccaccacccttctttgttctcctacagcaccttgtgcatactttattagtgcacttatgtgattctgaaatgatttgtctcatttcaatcaattatgaagtcctaaaagctgtgcctcttcaatatctccaaaatcctgccttctcttgaacctggttttcctgctttcatttctgtcccccgcccatttcaaaattagcaacagaggggtctgtttcaaatgcaaatcgaatgtcccttccttgcttcaaacggatcctttaaggagggttgaaatcagaaccagtagatatttggaaaatgttactttaacatgtgaatacgtgaatgaggtcaaaaatggcttcatggaagtcaaatttctgtcaggtcttttaggattaataaactatcagtcaatggaaaatgctagggagtacattctttaaggatttggaacaggaattcaaagaaattaaagagtgtgtaagcagaaactcagttgtatgtaagaaaacccagttccccctgagaaagagaaaaagatgaagtcctttaaaaactatactgcctatttttctgtggctagtgagccttatctctcctcccttcccaggcattgtgaagaccctgtttctctagctgtgcagctgcgaggtcactagacagataaactcaagttgcaaaacatgtttttccttgaaaagtaagaaatgatgtaatgactgtctcaattgaataactgccattgtttctcacttctgtagtatgcttccccctgcacagatctccacccccccacacacacccccgccccacaaaatgcttaaaaagtaaactaactctttgttcagggcttagtcctttggatgttaatccgactgggccagtgcacctaaataattaatacatatcctcctgaaccccatcaatctctctgattccttaacaatcctgctacattttctttaaggaatctgagtaggctagattagaatgggttgcttagatggaagaattatgggacataacactggaaatgttgcccgaagctgcaaggagaattttgaatgcaatactgaagagttgcaccactacaagtgctttatgcaagacaaaatttagttctgcatctaatttccctacttaaaactaacacagcttaagaacgttaaataggaaatgaatgtttattaggtggcaggtcatattcagggtctcaaaagacactctatgtcagagcaatgtcagaagaatacaggagagctgttgggagggacctgaggggccagagagatataaatttaagagctacaatttgaatgtcttgatgtgaaaataactaagagggggaggagccaagatggccgaataggaacagctccggtctacagctcgcagcgtgagcgacacagaagaccagtgatttctgcatttccaactgaggtaccaggttcatctcactgggaagtgccacacagtaggtgcaggagagtgggtgcagcacactgtgcatgagccaaagcagggcgaggcatcacctcacccaggaagcgcaaggggtcagggaattccctttcctagtcaaagaaagggctgacagacagcacctggaaaattgggtcactcccaccctaataatacgcttttccaacgggcttaaaaaacggcacaccaggagattatatcccgcacctggctcagagggtcccacgcccacggagtctctctcattgctagcacagcagtccaagatcaaactgcaaggtggcagcaaggctggaggaggggcgcccgccattgccgagttagttgtttgattaggtaaacaaagcggccgggaagctcgaactgggtggagcccaccacagctcaaggaggcctgcctgcctctgtaggctccacctctgggggcagggcacagacaaatgaaaagactgcagtaaactctgcagacttaaatgtccctctctgacagctttgaagagagtattggttctcccagcacgcagcttcagatctgagaacaggcagactgcctcctcaagtgggtccctgaccccagagtagcctaacagggaggcaccccccagtaggggcggactgacacctcacacagccaggtactcctctgagacaaaacttccagaggaacgatcaggcagcagcatttgcggttcaccaatatccgttgttctgcagccaccgctgctgatacccaggcaaacagggtctggagtggacctctagcaaactccaacagacctgcagctgagggtcctgtctgttagaaggaaaactaacaaacagaaaggtcatccacaccaaaaacccatctgtacttcaccatcatcaaagaccaaaggtagataaaaccacaaagatgggaaaaaaacagagcagaaaaactggaaactctaaaaatcagagcacctctcctcctccaaagcaacgcagctcctcaccagcaacggaataaagctggacggagaatgactttgacgaattgagagaagaaggcttcagacgatcaaactacactgaactacaggaggaaattggaaccaatggcaaagaagttaaaagctttgaaaaaaaattagatgaatggataactagaataaccaatgcagagaagtccttaaaggacctgatggacctgaaaaccaaggtacgagagctacgtgatgaaagcaggagcctcagtagccgatgcaatcaactggaagaaagggtatcagtgatggaagatgaaatgaatgaaattaaatgagaagtttagagaagaaagaataaaaagaaatgaacaaagcctccaagaaatatgggactatgtgaaaagaccaaatctatgtctgattggtgtacctgaaaatgacggggagaatgcaaccaagttggaaaacactctgcaggatattatccaggagaacttccccaatctagcaaggcaggccaacattcacattcaggaaatacagagaacgccacaaaggtactccttgagaagagcaactccaagacacataattgtcagattcaccaaagttgaaatgaaggaaaaaatgttaagggcagccagagagaaaggtcaggttacccacaaagggaagcccatcagactaacagctgatctctcggcagaaactctacaaaccagaagagagtgggggccaatattcaacatgcttaaagaaaagaattttcaatccagaatttcatatccagccaaactaagcttcataagtgaaggagaaataaaatactttacagacaagcaaatgctgagagattttgtcaccaccaggcctgccctaaaagagctcctgaaggaagcactaaacatggaaaggaacaaccggtaccagtcactgcaaaaacatgccaaattgtaaagatgatcaaggctaggaagaaactgcatcaactaatgagcaaaatcaccagctaacatcataatgacaggatcaaattcacacataacaatattaactttaaatgtaaatgggctaaatgctccaattaaaagacacagactggcaaattcgataaagagtcaagacccatcagtgtgctgtattcaggaaacccatctcacatgtagagacacacataggctcaaaataaagggatggaggaagatctaccaagcaagtggaaaacaaaaaaaggcaggggttgcaatcctagtctcagataaaacagactttaaatcaacaaagatcaaaagagacaaagaaggccattacataatggtaaagggatcaattcaacaggaagagctaactatcctaaatatatatgcacccaatacaggagcacccagatcttaaagcaggtccttagtgacccacaaagagacttagactcccacacaataataatgggagactttagcaccccactgtcaacattagatagatcaatgagacagaaagttaaaaaggatacccaggaattgaactcagctctgcaccaagcggacctaatagacatctacagaaatctccaccccaaatcaacagaatatacatttttttcagcaccacaccacacctaatccaaaactgaccacatagttggaagtaaagcactcctcagcaaatgtaaaagaacagaaattgtaacaaactgtctctcagaccacagtgcaatcaaactagaactcaggattaagaaactcactcaaaaccgctccactacatggaaactgaacaacctgttcctgaatgactactgggtacataatgaaatgaaggcagaaataaagatgttctttgaaatcaacaagaacaaagacacaaagaatctctgggacacattcaaagcagtgtgtagagggaaatttatagcactaaatgcccacaagagacagcaggaaagatctaaaattgacaccctaacatcacaattagaagacctagaaaagcaagagcaaacacattcaaaagctagcagaagacgagaaataactaagatcagagcagaactgaaggaaatagagacacaaaaaacccttcaaaaattaatgaatccaggagctggttttttgaaaacatcaacaaaattgatagaccgctaccaagactaataaagaagaaaagagagaagaatcaaatagatgcaataaaaaatgataaaggagatatcaccactgatcccacagaaatacaaactaccatcagagaatactgtaaacacctctacgcaaataaactagaaaatctagaagaaatgcataaattcatcgacacatacaccctcccaagactaaaccaggaagaagttgactctctgaatagaccaataacaggctctgaaattgaggcaataatcaatagctcaccatccaaaaaaagtccagtaccagatggattcacagccgaattctaccagaggtacaaagaggagctgttaccgttccttctgaaactattccaatcaattgaaaaagagggaatcctccctaactcattctatgaggccagcatcatcctgataccaaagcctggaagagacacaaacaaaaaagagaattttagaccaatatccttgatgaacatcgatgcaaaaatcctcaataaaatactggcaaacagaatccagcagcacatcaaaaagcttatccaccatgatcaagtgggcttcatccctgggatgcaaggctggttcaacatacgcaaatcaataaatgtaatccagcatagaaagagaaccaaagacaaaaaccacatgattatctcaatagatgcagaaaaggcctttgacaaaattcaacaactcttcatgctaaaaactttcaataaattaggtattgatgggatgtatctcaaaataataagagctatctatgacaaacccacagacaatatcatactgaatgggcaaaaactggaagcattccctttgaaaactggcacaagacagggatgccctctctcaccactcctattcaacacagtgttggaagttctggccagggaaatcaggcaggagaaataaataaagggtattcaattaggaaaagaggaagtcaaattgtccgtttgcagatgacatgattgtatatctagaaaaccccatcatctcaggccaaaatctcctcaagctgataaacaacttcagcaaattctcaggatacaaaatcaatgtgcaaaaatcacaagcattctcatacaccaataacagacaaacagagagccaaatcatgagtgaactcccattcacaattgcttcaaagagaataaaatacctaggaatccaacttacaagggatgtgaaggacctcttcaaggagaactacaaaccactgctcaatgaaataaaagaggatacaaacaaatggaaaaacatcccatgctcatgggttggaagaatcaatatcgtgaaaatggccatactgcccaaggtcatttatagattcaatgccatccccatcaagctaccaatgactttcttcacagaattggaaaaaactactgtaaagttcatatggaactaaaaaagagccctcattgccaagtcaatcctaagccaaaagaacaaagctggaggcatcatgctacctgatttcaaactatactacaagactacagtaaccaaaacagcatggtactggtaccaaaacagagatacagaccaatggaacagaacagagccctcagaaataatgccccatatctacaaccatctgatctttgacaaacctgacaaaaacaagcaatggggaaaggattccctatttaataaatggtgctgggaaaactggctagccatatgtagaaagctgaaactggatcccttccttacatcttatacaaaaattaattcaagatggattaaagactgaaatgttagacataaaaccataaaaaccctagaagaaaacctaggcaataccattcaggacataggcatgggcaaggacttcatgtctaaaacaccaaaagcaatggcaacaaaagccaaaattgacaaatgggatctaattcaactaaagagcttctgcacagcaaaagaaaccaccatcagagtgaacacgcaacttacagaatgggagaaaatttctgcaacctactcatctgataaagggctaatatccagaatctacaatgaactcaaacaagtttacaagaaaaaatgaacaaccccatcaaaaagtgggcaaaggatatgaacagacacttctcaaaagaagacatttatgcagccaaaaaacacatgaaaaaatgctcatcatcactagccatcagagaaatgcaaatcaaaaccacaatgagataccatctcacaccagttagaatggcgatcattaaaaagtcaggaaacaacaggttctggagaggatgtggagaaataggaacacttttacactgttggtgggactgtaaactagttcaaccattgtggaagttggtgtggcgattcctcagggatctaggactagaaatactatttgacccagccatcccattactgggtatatacccaaaggattataaatcatactgctataaagacacatgcacacgtatgtttattgcggcactattcacaatagcaaagacttggaaccaaccgaaatgtccatcagtgatagactggattaagaaaatgtggcacatatacaccacggaatactatgcagccataaaaaaggatgagttaatgtcctttgtagggacatggatgaaactggaaaccatcattctcagcaaactatctcaaggacaaaaaaccaaacactgcatgttctcactcacagatgggaattgaacaatgagaacacatggacacaggaaggggaacatcacacactggggactgttgtggggtggggggaggggggagggatagcattaggagatatacctaatgctaaatgatgagttaatgggtgtagcacaccaacatggcacatgtatacatatgtaacaaacctgcatgttgtacacatgcaccctaaaacttaaagtataataataataaaatttaaaaaaaaaagaaaataactaagacatatactgacctagaaaaaaaaatttaaagaaaatcattacttactgtagtatttgaccaaagccagtatttgtttaaatactaatacttaaatatatattaatcctattttattttttgaaaaactttagttaaaacaaatttaatagagtttatgtgagcaaaggacaattcccaaatcaaagcagccctcaagaatcagaagggttcatacaactccacttggcaacctggcagtatttcagacagaaaaaggctgaagaaaacaaagaaggaacaaaaagcagataggttgtttcaaagttactttccttgtaaaggttaaaccagaggggacttccttattatgctgctaaaactggactgtttgggaattgggctattattgctctctcttggaaggtcagataaacaatttagtttttgcttggtggtatggaactttagcattagtgactccattttggtttggtctgttggggcctagtccagaaactcagtccaaagcaatggcttcccattattttatttaacacattgtaggggatgaaaagtatcttttcctcatccatccctaagttcacagcagaaggccctataacaaaacacagattaacaagagaagagtaaatacattatttaatatgttttttgtgacacaggggccttcagaaattaagacaaaaagaaataggtaaacttgtgtatttttacacttaggttaatgaagaggtagatagtcgtagagaggtatgattagacaaagagagtgtgatctaacggtaataaacaggggaatttggcaaggtctgtttgttcacattcttccctgtgtccctctcttcagagaggcgggcggatcacgaggtcaggagttcgagaccatcctggctaacatggtgaaaccccgtctctactaaaaatacaaaaaaaaaaaaattagccaggcgtggtggcgggcacctgtaatcccagctactggggaggctgaggcaggagaatggcatgaacccgggaggcggagcttgcagtgagccaagatcgtgccactgcactccagcctgggcaacagagctagactatgtctcaaaaaaaaaaaaaaaaaaaaaagaatgttccttccctccaggtataggaaggatgcctcttgaatgaagatattttctcaaaggagaagggttggggaaggttgagcatggcatctacttcctctgttttctcaaattccaagcctccatattttgagatggcatgttctgaagcccatggctattccaaaataatccattctcatgacaacaatctaattggtgagaataggcaacaactacaataaaattagaaaaaagggtgccataattttaaaagaaaaaatgctacaaaaattatttgtccccatcgagaaagcaataggttgtttaagactgtgctctggtgtgtagaagcttggttatcaaattcaagtgctcagaggaagatgttttattctctgtttataaaaaataaatagttctgcattaggaaaagtttctgcttaatgatatgaatcatctttaactagctaagagtgaaaccgttgatttttgacttgttaatctgcttgaagactgggaaagggtgaattactgtagtttcagttattattataactattatttttgttttctgatgaagtttcgctcttgtcccccaggctggaatgcaatggcgcaatctcggctcactgcaacctctgcctcccagattcaaacaattttcctgcctcaccctcccaagtagctgggattaccagcatgcgccaccacgcccagctaatttttgtatttttagtagagacagggtttcaccatgttggctaggctggacttgaactcctgacttcaagcgatccactcaccttggcctcccaaagtgctaggattacaggtgtgagccaccgcacctagccttctgttactatttttaaggctttaaaaaaaaatagattgataatagaaacacctggattaaattccttgacctgcaatgattgtagagctttatgttgccccattttatcagtcaacaaatttgtcttaacattaaaaaaaaaatcttgacattaatgagatacatattttgcaaacttaaagttacgtaagtatttctcagaaacagttattatcatgattcagaatgtcagttttgataatattataggatattttatgacatcttaaagtaacatttaaaagtaggtgaaacggactcatggtggattgaatatggttatctccctccctccattaacctggcatttactgaaatggcaacacttttaggagtaacacagaagggtaatctctcctggttacatgccatttaagaaatactggtgatagcaatgatttaaacttaatgttagaaattgagctgaatgaaaaaacataatgtgtttttagactgcaaatggcatgtattagtagactccaaatagtgagattctaaaaagtatactagtctgggagaggactagacttttctagactagaactaaattattttgaaactagtattttaattaaaaaaaaaaagaaagaaaagggagagaggaaaaagagagagagaaatagagagagggagagaaagagacaaaggaaggaaggaaggaagaaagagagggagggagggaagaaggaaggaaggagagatatggaaggagaagagagaaaattaaatagaacaaacaatacttggtgccaaattcagtggacatttttccatgagaataaaaacaatcataaaactataaacatgaataatacataggaacataaattttgtggctgctgtcaaaatgataatgctgctcctatttttagaaatatttttactgtatacattcagttaattttatccagctgtcagtatgcattctggaagttgccagaaagtgaatgaatgtgaacatttaaaagaatgaataaaataatcttaacatgtctgtgagtgtaaagaagagctcgtgcaccaaatggcttcactgtctactttttggcacaggtatcaaggtggtacatgtaggatatgctcttggaattgtttttccaacagaaattttagatttgtaatgaatattttcaatcttaaagggtctttctcatggccaatagtagcatccttttctgagatggctggtggggaccacagaaccagtctgctgtctgataaactaatccagacaagctcagataaggatttggctcttgagctcacactcaaaagttccccaatacaatgacaagcattcttaattcctccattacaattttttttaatggtgtggttaggttgtctgggtacccatcagcatatggcctttgcactgaccactggtaaacagaggactgtgtggccatgcaatgatcacaggctttgggatcgagggatgtggggtcaggtcccatcctggctacccactagctatgttatataacttctggcaattttcccatctgaaaatgggtctaataatgtctacttcacagggatagcttacctcttcacaattatgtaagcaaagaatttagcactgtgccaaacacagaatacagtcaccagggccgacagcagtcacttttggcagctctaacatgttgctgctcagattttcatgtactggttgttttttttttaaatgaagccaaaaattataggaactttacctaacacccaatgatatctgaatgccttcttcccacaaaagttatggttattccaaaattagaatgttaataataaatcaaaaacagtgggtcttaaccaagaaagacagccaagtgttttgaagccagacaaatcggtttctaatcttaacttcctacgtactaggcacatggccttgggtgagtaattcatgtctttcaattttctcatatgtaaaatgggcaacagtacttacttcatggtgttgtcatctagatgaaatgaaacaacgtgtatgaattctggctgtgccatttaccagctgtgtgatcttgggcaagtttctaaatctctgggtgctgcagtttgctcataggtcaggtggatttcacagtcatcctaacgcagaggttgttaggaggattacatgggttagctcagagaatgcacctaaaacaatgactggcacatggtaagtactcaataaatgttataacgctactcatttttcattgtcacttcttcttcattggttttattgttaatagccagaaattaggttgatgagataacaatggcgtagagttgaaaaaattgctttaacactttagagcataacacgccaagaggattaacctactggaagtggtatgctgcccactgctctcttggatttaatattacatggactctcaatggaaagcaaagaggagttgaggtggggcagaggagaagtagttgctctggaaacactgatggaagtgagagggccactcagctgtggtgagccacctctgagccactgaaactggcccagtgtcatctttcatagttgtcttcaccttgcatttcacagttcacaaaacacttcatatccaccatcacacacttactctccccatgctaccccttgcagtaggtggatatgctgagtggccaatccccatactgcataccccactccactcaggtttcttttttgcttggttttctctctagtgatggaggtctcccctcatatcaggaattaattaaaaaaaaaagttgccatggaagttgctgaaagtttccaagtatcgacaggagaatagttaattggcctgtcagactacacaacctcctcagaggtcatctctggctgagtaaacactgcatctctgccatttactcactaaagcagtcaaaattcctcttgacagaactggattccaaaacaacaacaacaaaaaaaacctgctccaaaggtaagagacagcttattaaatttgtgtcaagcctactgcctgataccttttaagcccagtctgatttctttcaggcccttgacacgtgctaattggcattactctgttagcagatgctgagaggagacaggcatccaggcttcctgcttctctgtactcagcatgacatcctctcataaataccaaatgggatgccttaaacgactgggaaatacatgctaaatgggtacttagatgtatttagacagcttatttatcactgaatatggcaaaactctttgtgtgctcttttggggaggtaaagaatgtcacaagcgatggagcaaagtagaaaatgtgccacatggaaatcaaccatattgtaaacagtacatgcctattatggcctttccacaccttacagtttattactatgggagctcttacagctccttcctgggctttcattcttttgacaaatatttatcattgctgggctaggttctgttctgggcactgggaatacaccaccaaacaaaacagataaaaaatgcctgtcctcgtggaacttatatagtaataaaagatgtaggatgtcgcatggagatgaatgtgatggagatgggatggggtggggtggggtggggtggggtgggatggggtgggcttgggacagagttggggaatcgactttaattaacctggtcagaggccaggctgagcaaagacctgaaggaggccaagccagtcaggccggaataggaggagtgttttagaggaggggcagaagcctgaggggcagccagcttggtgcacagagactggcagatgagagcacagggagtgtgggacagcgtggtgggaaatgcggctagagaactggctggaggtggatacaagccgacctttgtaagggctcaaccaccactgcactttagaatcccctgtggagcttttaaaccaagtgaatcagaatctcctgcggtgaagcccaggcctggggatgtttttgaaatctccacatgtgcctccagtgagtagtcagaggaaggacatgagctgccttctgctcagagggatcctgagctttaagaacagaccccaggaggggacgggtggatgcagggaggccagtcaggtgctgcaatcatccagggagggagctggtgactgggatgtgggatcaagtggtggtggtgagaagagctcagactccaggtatattttgaaggcagagccaagagaatgttcctgcagatcaggcatagggagtaaaagcagaaggtagtcaaagatgacaccaaggttttggggctgagcaattggaagaatggaattgccatttgactgaaatgagaaaagtcatgggaagaacctagaaggcatttttacatcatatacgaacactttgcatggaaatgcccatagatagtaaaatgctcagtacctggcacgtaaaggattcactaatgcttttaaaagacagtatgtgtggtgaggctgaagggcaagtatctacagctgagtatctttaaggtggtttggtagcaaataataaacaagtgttccaagcatttttccagagatacgtagaggagatgaagatgtagccaggaaaactccctataaatgtctctgcctccatctaaatctttagataatgtgggaagaggcttcattgcctggcagaaattctggcaactgcccctacattcaaggaaaagtatgagatatacttaatactggtagatgacactcccatctcccccagtgtgtggtacttaaagctgaataccctgagtgacaaatagcaggggagttagccagtcaccttgccactatatgtagaaaatacctacagagcagtgccttctctagttctttaggaaaacctcagcccttttacggggctgtatataatttcattttcaacaaccctgccaaattcctaacatgcttaatattgaccaattaaacaagaaaaaatgtaataatacatttgtcattcaaatcactatgtactatagctaattaaggtccttattacaaattatatacaatagtcaattatatgctttttcaattgaatccttacatgagtaagatttattaacacaaatagctcctgacaaacttggcccaggaacaagcactgtatttcctctgggttttggaaaaaagtcaaagttattataaacggttgcttaggggagatatttgctattttctccactgatttgaagtaggtcagattgagagctgaatgcttccctaaggttataattaagtatgaatattaaaaagctgagaacaaataaaaaaaatacaactgctttaagctttcacatcacagaccttgcattgtgttttcacctcaggcaagatactttctctgggaaaaggaatacggttgaaaaaataggctttaaaaaaactgcaatagctctacaagcctagactttgagaaagatttgtgcaaacaaaagtgctttgaagaagtatttaaccaggtagagttggggcaaaaatgcacacaaatgctgaaaaagcagcctgaactattgtgatttaattctgcaggacagtctgatgtttatccccccgcccccttgaaaatcacatctttctgcctcttcccatccaaatcattcactcttataaaactagcttagtcagatcaatatctgagctagcaatgtaaatttaatcatggtgaggcctgggtaaacattagctctaagacatttcttggtctatagagtgataactgaattaagtaggattatttcatcattacagtattaagcccacaatgttacacaagagaagctaatatttctaactcttttcagcttagcaaaatatgctataagcatttacatgagccaatttagtatgtttcctccttgaagagctatgaaataggaatacatggcagctaaattttcagtgtagagagaggaatgtctagtaatcaaactatcgaagggcctcattataagaccgttcctgggatgctggcactctggcctcctgacagccactttagttgaattcccatggacctgggaattcacagtcttgccttccatctcctgcattttcagctgtgcagattctctaaacatagtcttccttgaagcccccacttgggcattatttcttccaggaatctttccctgacttccctgtctttgggcatttctgtatcatggcactggcctcatgataaaactatatttctgcctctctttgaaacctgggagcagcttgatcatcattgatgtctgggtcaagcacaaggactggcatatattaggtattcaatactatttatggaatgcatgaatgaatgaacgaatgaatagaattaaaaagctaagacatggaaacatatcccatgtgctaggtactggataaagagatagaaggcatatcctctagaagttgaagatctgggtcaggaaggggggaatataaagagaggcagaagaatataagccggcatttcttaaggaccaaagcagtgagctgctaggactaaggcagccgcagcatggaaagacagagtagaatcctggaaacagccagcacactgaaggaaaggtagcctcaagccagacaaaaggaggcaggagggcaaaggggacatgatgagcaacgccctcttatggagctgagaagaattacagtttaatttattagatgacagacattgaaagactgggttctgaatccagacaactgggtttaaatcctgactcctttactacatgctctctgggcaaatcacgtaatattcctaagcctcagtatctccatctgtcaaatggacacgaaaataatatccccctcacagatatgagataaaatatataaagccattagcaaggagcttacatataagaaatgttattattgtttttattcacattctgtatggcatggctaggacacacacatttaaaaggcttcagcctaactgtatggaggtgagggctgtgcatatagatagaggaccagtgcaaaattttaaggtccctgactcctctagatttgattaagaatgataatgtataaccctaaaacatcagctagctgcaggtcaagatcctagctaaggtaatatttgcggcatttgtgggatggttatgtagtatttaaacctgtaccacattggcctagttggttaaaacaagatctctgagtatattcccttctcacctcctactggccattatagttacaaatagattacctcatttcttttgaatgggtttatttgtttgctctctcagttgtactgtaatctcctttaagaggagaaagtggttattatacatcatttatggctgtgtctagcaatgcccaataatcttctttgggttactactagccattcatcaccaaagtgatcaccctcaatcctagattcttgactccatgactctaagatcctgtggacactacaaaaattttctacaaatacatttgacactctgctaacctcatagggaagtttaatcaagtaagctagtgagactaccctgttaaataattttaaaattatcttgagaaatctatttttaaaattagttggaagaatctcccatggggtctgacttgtctctgccactttcctagaaatttaaaacaaattctctgatattccctcaaatagaatgtttacccatacatttgggtcattttttaatttaaaaatattgaatgtaatcacttattcatttcaatattttgatatatagtttataacgataaagcagatatttattttgcatattaggcaatttcatgtgtgaagtgcaactggactaaaaagagccaatagactggagccaatagtttataaacctcttatcttcttaggtagatttcaaattttgctacttagtaacacattgtattttatagggaaaaaaacatgttcacctttattatgatttataatcccctgaccttccatttctgttctccccagacttgctgcgagcattagttcattcaactcttacatttatagagagcttgcttctcactcatgctttacaaagtcattctattggttaaacgtctatgcgagtactgtggagagatattttttaaaataattatcatgataaaaacagcttattaactcggtcacctgggaaaatgatttatcctttcccatcttttgctttttaccatctgtaacagagtaatatttcctgtcatttaaggctgctataacaaggaatgataataaataaaaactatctcacacagtgtccctggtatttagtaggtgcttaataagttaaaaccagtataaatgccatatgcacattttacaattgacaaagtatctatttttatatactctggtccttattgtaaaagagcttccttccctggcatctatccacaagcaacaatggccgcttaagcagtcctctaaattattcaagagatagttataagactttttagttctactttttatatattaccatccaatattacttgcaagggcaaattaatcatcatctttccacactaactttcatattataataaatcatgaatcagggggctggctcttgggcagggatgaatgagagaaccatgaaaaaaatcttgtgctttctttaaaaactattcttctaatatattggagaagcaaagagtttgcttctccgtagacgaaatctgcactcaaacatccttggaatatgtcctcactttattataatctaatcaaatttgaaagctccaaagctcattgctaggaacccaatctgttgtagctgcttcaaactagaaatagttttaacaaatgaaagaatcagggatatagtcatctcaaagtaattattccatgttccccagtttagaaaaatataagtcataagttacagccaatttactctatgtttcatttagtgtccgtgaatcaaactcttctgtttttctaatatatgagaatatttttagagggctaaaattcttctttttattaataaatgtattagcaagtaaaaggaatgtattttgacatagcctcaaatacacaatttgctatggtcccatttcaggatgtgtttcatcaaaataggtagaatcagaataggtagaatcagaatggcacagtaaatttaaaaaaaaaaaaaagttgggcaggccttaccccaaacatcttgaataggaatctctggttgagaagtgtgcagggggtagctgctggaaacccttgcttgtttagctttcccctacgagtctattgagaaacctagttttgaacctactgctagatcatttggtaaactagatgacactggaaggtgacaccaagctagcagcagttatggcaaaggaaaagcaatgatgctgtaggatgcttaggctgtatcctgttttaatagtgcttcgccagaggatcccaaatcaaatatcttttcagaatttgaactggtaatgtctcttcctgttcctctgatgtttccacccccctaagtttaatctacgtcccttgtgattgttaggaaaatgtttattttaaaatataaaaaacatttttccgtgcaaataattcaagcaattaaagctaaaaaatgaatatattttagtgtctctagactgaacagtgaggactaatgcagaagttaattataaataagaaaatcttttaggtccttctttcagattctagatcttgaaagtgtctttaaaattttaactcacaactatagaatatattatcatatgtatatagggaatagtggacccagtatctttattataataaaaaatactctaagccttggaaaatttcacttttatgaactttgattgatttctccagtgagtttccacttctcgcaactatataataaaaaatactaagtggcttaaaaaaaatcagttacatagattattacttggaaagaaaattatataaaaggtctcagtgagataaattttaaaagggtaagttacttttgttcttatatttaaaatatatgtgatcaggctcctataaaaaaattggtacatccaagaacttaaaattctacatcataacattcagtttcatacttttttgatcaacagcccttcctacttttgctcaaaacacagctttgcttttcagtatttgggattttctttctgcttttgtttgtttgtttgttttggttataagtatcttagtttctatctcagctcatcctatccttttgccagaaagccattccttactcctagcactgtccatatttccctggcaaatgcaacacttactttcataggatcaaggatttgaggaatggaagaaccttagcggtcccttccgaaaaagatttaatttaggaatcctctctccaacttccttgtcagaggatggtcctagctctattaaacattcccggaatatcacattgctggagagctttcatggatcaagaggtttcccttgtgtccagactagctgtatgatcctaaacaaatcacagcatctcttgagtctgcgtttctataaagcaagaagaggtgatgatttccaaggtcatacaagtcacagaattcttcctaattattttaatggcagtaagcagaataaaatgcttgcttgtaacatctttggctctgaaggatattgtccaaagggtgaggttggtgtttaaggggcagggacagtaatttttaacaccatccaatagggacttttcaatgctaccgagcagcggatctacatactgttccctaaaaggacacctcctggctacttgttccttaacttcccgctgcccagtctgccactgaaagccccacatggcacttagggagctctcaccatgcatccctgattatcgttattactattactattctgatttgttcacagaaaaccattactaccagtcagtggttgatcttctatccttatctacttatctgcaatatttttcactgttgcccactcccattctttaaaaattatcttctttcttagccccaggacaatcaatctttgattctcctttgcaatgttttgatcacttttttatgcccatcccttaaaaaggagtcatttctttggacctccaatcttcaccagggagaatgctaaaccccagctctccttctttccctgccactgtttgaccttacacaggtcgtattctctctgggcctcatttgtccctgagaaaagagaaggagctggagtgatgatgtggaacatctcttcaagctgtacactgctatgctagtcatcttaatcccattcctgtattccttcagtatgtggtagagtttcagaaagcaagtataggtctgtgatgatgctaataccaccaagaaatcattcattccagtatggggagaaaccttaaacaccatctggtctgaaacctttgttttacagatgagggaacctaggttcagagagggtacttgattgcctcaaagcagagacaggataataaggaggtctcctgggctctcacttgttgcaaaataaatttgagtgttttctggatctggctaaagtgcacaatgatatcagagtaaaacgtcatacggaaggtataaattgatctagaacacattaaagccttcccctccccctttaaaaaaatcaactttaagaattttggagagagatttgctatcagtggtgctttatacaaaatagcataatctgataacataagacattttagatttatgtttttaaatagccaaataaaacaaaatatcaagtcacagattacatatatttacattaattcaaatgtccaaagcacagtacagtagggtctatttaatagttcacataatttaagatttacatatacacaagcacatgaaccaatattagtttgctagaacagggatttaagaagttactcagacattttggtattgacacttacatatttatggcaacaaattatgatgactttaaattttcaatgagatcttttgtacaagaatacagaatgggaagaatgtacaaaatgaaaagacaggcaaacaaatgtactttccttgcactatttctataacaccatataggatgtggcattatccagtacattttatcagtgtagtctattcattctggtctaaaacggtaattttggctgaataacccccaaatctaactttgctttaggctttataattaattgatgcttgattcttctttctacatcttttaaaaatgaaattggacactagtgtttttctttaaaataactctggtactagtaagttagcaaagtctatttttaaaggacactaatacataaagtttattttttctttcaatatcctaaataaagggacaatgggagtcatatcacctttgggcctactctgaaattaccaatagtgctaaaagctaagatattgtgatctagaacttaaactttggaaaacaaccccatctttctatggcacattgaggaactgaagtactttacctcatttcctaccaatcattttaagagaatttggttgtatttcaaagaacaaaacaacacaatttctgtcctgctgtttattttgcagaccacacacaaagttaaatatgaacagattaaattatgacatcatacaaatataggcacaaattaagtggacgccacaaaaggtgtgtcagaaaacactgaattgactgaatctgagtcagatttccccctcgtggactttaggatgccctcagctatcactgcctcgctgggaaagagcctgactttcccgttctgccctgctgcagtatccttcaggggttccaaaaacaccactcttttacctgcacctgccttccgttcatcagcggaggcatcactagcggggccaggactgagaatcgatgaatgggcattgctttggtgtagcatatttttctgtctcttggttttacacttgcaggggcatggagtcagatagaggtacaaaagtaccaaaacgatactggccacgcaagcagcaagagtggtaaaagctgtgttaaatgcctcatgagcatgggatctgcttacagtgaaattgctcacatttattgtgacgtccacagtttcatttaacaggcgttgcttattcattgcgatacaagaatacactccagcatcctcaaaacgagggctttctataaccagacttccattgtgaaacacgtaaaagttttccatctctttatccggctctagcagtctgttatctggacccacccagatgaaatccgtatttgcattacctgtcttgctgtcacagtggaccatcagtctttccccgacctgagcctcatgaataaagccaagcgcacgaaaggaaccattgatgatgctgtcagagcaattcataaagctatcctggagcagaagtacctgacgcgagtgcctggagtcagaccacaggcgacaggtgtaatcgttcttaaaatccatcactgagctaaagtgcctacgataccaaaagaccagcaaggagtacagggaacagtcacagacaaatgggtttccatgaaggtagatgcctctcagctgttttcctggcactaaatttatgtggtgcattggcatggaaggaattcggttataagaaacatctaaaaacatcagttctgccagcttgaaccttccaacatacaaatccatcggaaactgtgtgagaaaatttccacttaagtagagtttctgcaactgggagagccctccaaacgctgaaggatcgagataggatatgtgattgttgtaaagcagaagcacttccagaaccttcaactcttggaatacagcatttttcaccgtcttcagcttattggacgataagtcaagacacttcaaatttggagttgtggaaaaactgcccgtggaaatgctggtgatgttgttatgacgaagaattagggtgttcagctttgcaaacgatactggaatccactcagaatccagaagcccaattctgttataactcaggtccagtctcttaatcagtctgaaaaggttcccaggcaccttggacaggtttttgttggtgcagctgacgatgtcagtggcacagatgcaagcggtggggcacaccccagaggcaccagggcccacagtcactgtgatcatcagcaaacacagcagctccctgcagcccggtctgacgacggctccaagcagggtgggcagagtgtgtacacgtaacgacattatggtcgcctctgagtctcttcccggtgtcttttccaccggctcagcctcccaccagtgaacctggcaaacaattaataattcagagggagtaaaaagcagaaactgactaccactagttaacccataagagccataccttactttctttccaataacttttgaaatgggttttatttcacaatagggagctctgtgttgcctcttcactgttaaatgtattttttcctctttcctgggttagtcctgcttataaaaatgtacagtcacattctctccatacaacccaccgtctcacccaccatcagaaactcaattttttcctaaggtgcatcctgcgttgttgttgttgttgttgttgttttaaactccctccaacagacacaactatacgcaaacgtacgctacaaacaattaaacggaaatacttagcaaccacccatccaggaaaaaactcacggtgctggggagcctcgtgggctccggggaggctgcctacgcagtgccttccgaaggtctgcgcgtccgtctgtccgtgtctgtcactcttgcaccttccgacttcctttccctccggctcccggcgggcggcaccctctagccggctctcaactttgaggagtttcaagcagccgcggcggcagcagcagccctggacgcagcagccaagctcttcgctggctcccgggggctctcccgggttcctctcattgcaggctgaaggtaccgcctcggcgctctggccgccgtgtgcccgcgcgcggggcgccccgctcccagagccggggccgcgggagggggcgcaggcagccgggcggcagcgggcggccccgcctctccgcactcgggaggctgcaggacccggggttcccgcgcgcccggggccgggagacgggctggggcgccggtcccacccctgcgcgtcctgcctcctgcgggcagcagctcggagcctgcgggagggagcaggctgggcgcgtggtggggggcgcgcgatgcggagggggcggcggcgcagccaatccgagaggcggccggcgccccctcataccgccccgcggcctcgccgcctcctcccgctttcctcctccagctcccacccggacctctagaacggccgcgcagagcggggagggggcaggggtccacaccagaggcccagactctggtccttgagtcaagatgcccaacccactcgcctaccaattacgtcccttcgtccagctccaagccgggcggtaatggggtccaggaaggctaaaggggacacgcccagccaccgagggaggggtctcacccttggagacccacttcgcggcggccgcacaggtcacgtctctctccccacccaggccaaggaatccccggacctcttagagctttgctttggggcaagggccaaggaggctttgcctgcgccaagtgcagttgactgtctgggtttacaaaataaacccagaagcagcctgacgtctccgctcgtttctagggaggaggtcgcggggagggaagtcgggaacgtttcctctccacagggatatctgctgggaggaagtaaccgggaaatcgccacggggacacccctcacctccctgggaaagttctatccctttcctgactcaggaggcggcaacagggatggtgtccaattcaagaaggaggagggcaggaaagaaggcttggagccgaccttccggctggaatgcaaagataagagtattaacccaaataataataataatcccagagcagacctttttttcttttttctctcttctccttcccctcttctctctccctctctctctccctctctctcctttctctttcgttctctctctctcatttcctctgtctctgtccccgccacctccccgtcttttgcaagcgtgctcgtggcgcgtgcgggacagggaagtaaggggcgtgtgcgcggaggctcttcatcccttccggagatgccgcggccgaccagcgcgctttggttcagcaagcacagaaggtgcaagccgaacaaggccattcagaaatgaggtggagactatgaggctgatgagctctacgattaaaaatccatttttgtttaattccaagataagttttaacgatgggatttgagtgagtcagatcgcccatttggccattatatccggattaaaagaaataaattactgccttgacaaaagatgccaaccacagtggaatgaaaagcaaccaaattgaggaaacagttggggcaggatagataacttgtaatattacttaaaaataaaaatgatgaggacaaccaactcttcctcccctcccccgcgcaccttttcacttgagcaatcttgaatttagtgaaagttgtttcctacatggtccgtgagtcattgctgtggtcaggcagatttgttagaccaacacctaatttaaatagaattgtttgtggaataaagccgggctagcactaataaatctaggcattttcagatgaggacaacttgattcagattaatttatttcatgaaagttgaattttatcataagaacacagcctaaaatgcttcatgcaagcatttcttactgtgtacttaaaggggagaggcagaagttgagattttctagtattaggccacacttcctgggattctcaaaagcttggtctccaggacttcaattttatagagttagaatagttaatacagaggaatagaattaaaatcgctcagaggaatattttttaaatgactaataaatgaccaggtttttgcaggattttactaattaacatcgtattttaaggaaaccatgaaggcagaagaaagacctgtatttaatgcaaaaatagtctaaaaagaataagtgattcaaaaaaatggaaacaggaaggttatattattataactacaggcatattgtagaaacattatgcagagattacacagcaaaagtaaactaaatgcactcaaaatccatagacaaggctatttatccatttgaagacctgatttgggggatttcacatgtttgtgaaagggaagaacgttgtaaaaggattgagtttactagctgggaggaaagaaagataagagttgatcttaaggtataagacgtgaccttattttgtggaggataacatttttatctttctagcatcccttctccttctaacagattccctctttccactagaaggtaaattccaagaggatagcagttttatctgttttgtgtattgctgtattctcagctctcagaaccctgcttaacacattcaataaatttttgataaatgaactgatgaacagggaacctattcaaagtggttaagataacggtttaccccaactgaatctgctggttgctgtcctgccttttatgctttgaaagcttgtcttaaaaaaaaggagaagaaagagaaagaggagtcctgtaaatgttatttgagtcctggatctggtagtacctgaaggccactgcatacttttacttcctttttaattatattttccaccccacccccttttttagcttaaattattttgagttgcatgtcacttgtgacggacagagtactaacacatgtaatgatggtgataataaatatgtactgagcctttattatatgccagacactgagctatgcgttttacatgcattatttcatttattgctcaccacagccctgtgacattatataatcctataacccagatggtaaacaactgtgttccaaattatttgaaaatgaaatgggatgcaattatctcaaggttctatttgaaggatttagattaaacagaagagagacgtttctgccagggtggttccaacctggaatgggttgccaagacagatggttgagttgccttctcaggagtttaaaataggatgcgatagatattcctctggcctcttccacatgacataatacattggaatttttgaccattcagtaatgactccaagggatagtagaatgtggcttgacacttgacataattctgaatctagtatgctgagaagggggtgtggtcatgtgagtgtctagctgggtttggaaatactatctgcctgaggcagtaatttgaggtgatgaaatcacaggagttctagccctgtaatttccacaatttctcaggttgtaatcaaagatttaagtaattagagatatgagacaagaaattaatagcacatgtttgatgattctaagtcatttttactaataattaacacttcaatagcactttatgtcctaagaagggctttcacattctttatctcctttgactctaccacgcgtcctgtagtcaggtggaatttatacactggcagatatcttgttgcctcttttttcggcgtgaggcacactgggtgttctttggagatggagctcactggggtcactgattgctgcatgcaggagcttcctgtggagtttcatcactctggcgggcagcactcttaataggatttttacagtgtaacttagcttgaacccacaagaaaaacatacctttgcccaacaactatggaagtgcactcagctcctacagcatcctgttcttctcttggcctgctccagttggtttttgtaaattgcctaagattttttatagaaccagatctctcaccccatcctgtgtctttcattatatggagatacattttctgggaaaactcagactccagctcctgtgctttctgaactccaggaggcatgggtcagcttatggcatgtttctctggacgctccctttacttggctggaaatggggggatagaatgggagtattcagtattctgcaggaggtactgcatgtcctccccaggaagagctcacaatggggctactctttaagcagtctccactcactcatctggttggtctgtctcttatcttcattgacataggccggacagttttttgttttttaattcacttgagataaaatccacatgacataaaattcaccattgtaacaattttaaagtgcgcagttcagtgattgtttaatatattcacaatactgtgcaaccatcaccactatcttaattacagaatacagatgctcctcaatttacaatgggattacattccaaaaaaaactcaataaataagttaaaagtgcatttattacaccaaatctactgaacatcatagtttagcctagcctgccttaaatgtgcacagaacacttacactagcctacagttgagcaaaatcgtctaacacaaagtctatattatatttaaaaaagtgttgaattgctcatggaattcattgaatactatactgaaagtgaaaaacagaatgattgtatgggtacttgaagtatggtttctactgaatgtgtatcacttttgcaccattgtaaagttgaaacatcctaaggcaaactgaaccatcataagtcagagactgtctgtattttcatcaccccaaaaagaggtcctatgcccattaagcagttactcctatttccctttctctcagcccctggcaaccactaatgtactttctgtttctatggatttgcctattctggacattttatataaatggaatcattcaatatgtgtttttttgtgtctggcttctttcacttagcatgttttctaggtttggactgggatttttagctaagggttgcacagaatctgttaggatcacgctgttgaaagacctgcataggttagctgcactttaacttagaatgtggttgtggggaccaaagttccacttacccagagtcttgaattataaaagtattaaaactctgtgtgattgcagaaacctaccaaaattacaaggtgaggagatttaagaggtgatataaaatttagcttcagcagaaaacatttaggctgggatcggtggctcatgcctgtaatcccagcactttgggaggccgaggctagtgaatcacttgaggtcaggagttgggagaccagcctggccaacatctcttctggcaaatccccgtctctactaaagttacaaaaattagccaggcatggcagcacacacctataatcccagttactcaggaggctaaggcacgagaatcgcttgaacctgggagacagaggttgcagtgagcagagatcacattattgcactccagcctgggtgacagagcaagactccgtctcaaaacacgaaacaaaaaacccatttaacctctccaggaacctcaagagttaattgaggatgtaacaattgactatttctaaagttcctttcagcttcaaaaaattcacttgattttctgataacaatgtgtcctctgttgcccaagtcccgggaaccctgggttttgtttcttcacctgccagttagcactgccctgggcagacacagactcctcttctctctccagtgaatgacgtcagtcccattgctacttcaggaaaagtaacttaaggcaagttctttatagttgagaggtcactttaatctattaagtattctattgtgatgggtatcacatgttcattgcagtattttcttaatgtgcaacagggatgtgggcaaataaattcgggtacatccatctggtatgatatacattcttactgaaataatgtggcaggggactatctggtgacaaagcaaaaaaattacaaaatggtatggttccagtttttgtaaaagaaaaaatatatatgtatgttaattatatggtatgcatagataatcaaatgaaaaattatgtacctgtgccataacagtgtttcttttaacatatttcttctttttccttatctgtacatcctattattctagagtcctttgtgagaagaaaaagtacaatgaaaacttaatagtttttaaagtcatgtgcatcaatgtttctgcttaatttggttcctacttcagaatcaactactgtactttcagagagaaaaaccctcttctggcttctcaggcaggaagtgactcagacctcccctgtttgaggcatgataattgctgtcctgctttagctctgcattgtttattcggcggatatttactgagcgcccactgtgtgctaggcgctattctttagtctgagaattatagccatgcataaatgctgcaatagccatacaagtctgactaaaattaggcacataatagacatttaaatatttcttattgcccaattgtccatattctcagcgttcagggttcaacaaacttgggtgtgatcaactcacaatagctatgagtcctccccgatggcacattcttagtccagccttggtgaaggtggcatggtcccctgcccacactgctttttgtttttcaatgagaaataaaaataaaaataacaactaaaaagatttttcctaattcttaaagtactgtactatgtgcttatggtaaaaaaaaaaaaaaaaaaaaaaaggaagttacaggaaaaagaatcaaagaatgaatgccatttacaatctcactggaaggttacaatttctgctcaaagaataaatccattgaagtgaggaacctgagaagtttgcaaaaggatgatcttttttctttgtcataattatataatgagagaaacaagcaaacctctttttaaatactttaacattctcagctttaggaataaaataagcagatgaaaattagctttaaaaaactcagtgtgtcaaaactatgcatctagaattatcgttatctcttgagattttggtcataaatggcaggtgctctagtttttattttgctcattgttagcctgaagaggtcatctgattgaattcttaaacgctattatatccctcaaaactggggttaattttgcctctctgataaatatggataatatttaacaaacccagtttagagaactatatgaagcattcagagtcctattttatgccctttaaaaaattggatttcctgtagcagtaactaatttatcatagctttataaagggaatctaattattcaaagtaatatctaatttgaagcagccattattcaccaaccaacgttaacactaaacaaaataaaattgagagagaaaagaatcagctctctccattatacagtcagcactattgcaaatacttattcaattactttcagcaaacacaaggccctctgtggtggctgctccatgggtaatttgctctggaactctgacctttcagtttgtgacagtgaaaagaaacatcacattaatataggagaagatagaaggacctctcgaaagacccaagaaagtggtcttgataataatacctaccacttattatattctcaccatataccaggcttctcatttaattcttataaagggcttcagagatgggcattagcatccccattttctaatgagggccatggggctttgttggtttatataacctgcccaatattagtggtagaagcagatttctcacagaaatctgccttgctctggattgatgcttaacaattagttctaatgcttcccatttagggagtagcaaggtcagccataatttaaattccattcagcaaatattgttagtcctggctacactcccagagccgtgatatggttgctctcctctaggaatttgtagtattattagaaataattataggatataaggtggtatagaattcaattccaaattggataaaaccatgagccaaagtatttgcaacagaaaatatatacttggggcattcaaaaattccaaatattccaattcagaattttagatcttactcattttgttggaaaagtatctgattcaacaaagtaaattgtatgcaaataaaaatataatctggggaaaaccattaaacggtcagagatgaaaattttctcttagaattaagagtactaacatgaatccctattggtcatcttatctgtggcactcgcaataaagaattataagcaaggaaagtagtgtctctctcctgcacataccaaggaactgaaacaccttctaattaaatgccaaatagagtattgaataaagaatcaaatccctggattttgttccagaacatccatttattaactatataactctaggtaaatgactcaaccttttggattctcagcttcccctttgtaagatggaaacgcagtactaatatgtgcactgtttaatttcacaaagttgactgagatgaaacatgtaaaaagtgctttggtgaactataaagctgtaaaagagtacttgccttattgcccttgtgccttggatgtggtctgacgcagcacagatgtttaacaaatgtttgctgaacctaatggctaggtttatgtgcaaaataaacagagctggagaggtgtctcaacacaatgatgtttgtactaattatgtggctcccccgagcctggctgtaccagagtccagcaggtcctcatttcactcagctctgccttactctccatggtgctctctctcagctgctgcagactggaatgagtccactggtctgcatgcctaggcttctcaaaacccctggggactcgaaggtggcatgttgtggggagcaacctcagtgacctttagtagagagtgagggtcagcaatctcaaaacacactggagagtacccaaaggggttctgaactgcatggaaagcaaaataaataaaaaataataataatcactttctccagagagcagttttgacatgctgctacttgcctcttgcattgtgataaaaatacgtggtaggaaatcaatgtaggtttccttggcagctgttgtatagaagaggtcaggtgcaaatctgaacaagttgctgaaggatgagtctgctcacaggcgtttcctacttcatggaaacagccagatgatagaaaacatgcttaacatgacgattgttcatatttatctcaaagtaaaattttccattcactcaatatttattagaactactggatgcctaaattccttttgtctcaatttcctttcctgggaaggctctaagaaccttggctccttggctgtatttttagaaacagaatatgcattgccacagtgaacattaatatgtttgtttgtaggggtacctgggtgcaagataggcaatagggtcttcagacagggccgtctttataacattgacttagcccagcttgacaggtccagaaacttgatatttttggtgtcccagggctaattttacacatggagagggacttaaaatataaaccaaaaggccaggcgtggtggctcacgcctgtaatcccagcactttgggaggccaaggcaggcggatcatgaggtcaggagatcgagaccatcctggctaacacggtgaaaccgatctctactaaaaatatgaaaacaaaaaattaacagggcgtggtgacgggcacctgtagtcccagctacttgggaggctgaggcagaagaatggcatgaacccgggtggcggggcttgcagtgagctgagatcatgccactgaactccagcctgggtgacagagcaagactccatctcaaaaaaaaaaaatacatatatatatatatatatatatatatatatatgtatataccaaaaaacatacctacctatctggcatttattctctggctgcaagagagctttgggaagccaagtttataatcataaatatgtttggtgagtgtgaaataataaagaagagtaattcatttgatgacttgaatgtttagtggtatcaagctattgtgcatgacaaatccattgtcacaagagagatacgtttgccaataagaccaaatatttagatgggctggataagacactgtcatccccaggcagaaggcatgaagcagttaatcagtgaagtctctctctttttttgagacagagccttgctgtgtcacccaggctggagtgcagtggcatgatcttggctcactgcaacctctgcctcccgggttcaagtgattctcctgcctcaacctcccgagtagctgggattacaggcacacacaccatgcccagctgatttttgtattttcagcagagacagggtttcaccatgttggccaggctggtctcaaacccctgacctcaagtgatccacccacctcggcttcccaaagtgctgggattacaggcgtgagccacagcagtgggcctgaagtcttaatatacaggaaataccatggcctcatgattctgctcaaatcagaaaattgccctttctattaaagatgatctctccctattcctttatcagcccaataacggagaatgcaaagacaatacatcataaatatggtagaatgatgatcacacacaagagaggcaaatggacaacgaacagagaactcatatcagaaagacattatcagacagctgaggagccacgtggagaaaaaagccagtgcccagaagaatgtcatgagatgcaggcattttgcagagcctcaataaaatcaatataaatatgtatatcgaatgtgaactaaacaattacataagcagaagttaagttctgtccaatccttctgatggaatgcaaaattccaacaaagacaatcatgaggcaagaatcatgtaccatgcatagaaccggagtaccagagtaaaggcaaccacacccttgtaaccatcacccaaatcaagaaacaggacattaccagctctccaaaaattccctctgttcccttctagtcactaatttcccagtggtaaccactctgctgacatctaacaacatagattagctcacctgtttttatactttgtataaatggaatatatgcttttttgtgtctggtttctactgctcatctttatgttggagagattcatccatacttttgtatgtagttgtaaatcattcttactgctactgatatagcccaaattctgtggctatatcacaattggtttaactattttgttgttcatgggccggtttgttggaacaacattggaatatttggaacattgttccaaaaattggaacaaccatttgttccaaccatccaacaaatggttgttccaatttttgtctactaacaagtactgttgccatgaacattctgttcccccaaattccccccgattctaattcttttggtgaacatgtgcatacatttctagtaggtgtatgccttgaaatctgtttgatgggttacaggttatgcatatgttcaactctagtagtaactcccacttctccaaagtggttgtaccaatttattatcccacaagtggtatatgataattcttattccttcacgtccttgtcaacacttattattttccatctttttcatcttagccattttcgtggatagcaagtgttattttattatggttttatgttattttattatgcatttccctgagaattaataaacaattttctgtatgtttatttacacatctcttttatgagacttttgcccattatgctgttgagttgttcaactttttcttattgacttgcaggtgttctttatacattctagatttgtgttttttaatcatatatatgtgtgtttgcattggatataaattaatatatgttaatatttttctctcaccttgtgggttgccttttcactcaatttgggggaacagaagtttttagtttcaatgtagccaagtttatcacattttttccttttatgattaatgctttttcatttgcttattttctatttaacaaaggattgctgactccaaggtcatgaagatgttctactctagaagttttattgtttcatctttcaattatttctgcaatctgtctggtattgactcttgtgtgtaatgtgaaataaacattagaatacctttttttccacttgaatgttgaattgacacagcacaatttatctgaaagattatccttttccctactgcattgcaggatcacctttatcataaatcatgccaccatatatgtgcaggtctacttctggattccctgttgtgtttcattggacagttatctgttcttgcactagtaccacacagttttgattgtcataactttataataatagtttctgatatctcacagtgtaagtcctgtatatttattcttcaagaataacttgatgatttccaacttttacatttgatatgaattttaggaaaacttgtcaatttctggaaaaagaagaacctgtagcttagattttgaccaaaattgcatagatgaatgtattaatttggagagaactaacatctttacaatattgagtcttccaattataatgatgcatatacttccatttatttagctctcctttaatttttctcaataatattttagttttcagttagagatcttgcacatctttaattagatttatttctaggtgtttgagttttttgatgctattgtaaatatgttttattttctatttgtttattgccaatatatacaaatgcaactagtttttatatgttgactgtatatccggttcccttcctatattctcttattaattctaagaatttgtccttagattctctagaaattttgaatgtgcatgatcttattgtctggaaatgacaattttatttcttgctttccaatctccatgacatttatttctttctctgaccttttgcattggctagacctccttctacaatgttagactgaaatgatgacagtggtcattcttgacccagttccagtcttagggggaagttttcaacatactaccattgagaatgatgtttgctacggatattttgtagatattctttatgagattaagaaagttctgttcttaattgattacgtgttttcatcacaaatggatgttgaatttatcaaatgctttttctgcatttgagatgattgtatgattttactcctttttctgttaatgtggtgaattatgtttatgatttttgaatggtaagccacacttgtacacttggactgaacttgcactccatttactgtatcaatggatttggcttcctaatattttgttaagaatttttaagtaatgtttatgagaaagatgggcttgcagttttctttctcacaatcttgtcagggtttaaaaatcaagtttatgctattacaattttttttaagtctggaaagctcaccttctctttctgtgttctggaagaattatacaagacagctgttaatttttccttaagtgtttggaagaattcactgataaactatctgagcccaggcttttcttttttaaaataatgggcttaattttaaaaaaaaatacatcctaaattattgatattttcatctcttctcctgtcagtcttggtaaattgtattttcaaagagtttgtttatttcatccaaattgtcaaatttatcagcataaatttgttttaagtttccttttattgtccttttgatgcttgtatgatctatagtgatatctcctttttcattgctgttgttgcgaatttgttttgtctatttttttttcttttgatcagtcttctttagattttgatgtttttaaacaactgactttggctttattgtctttcttatatgttccttggtttttgcttttatctttatcatttctttttgtaagtttgattcctgctctctctctactttcttgaaattaacacttaaatcattgattttcaggctttttcctttctaatatggaatataagactatatatttccttctaagcaccattttagttttttcacatgatttttcaaatgtgatttttattatttaagtttaagaactaatttctgttttttttctttatcccatggattatttagagtatattgtttaattttgagcacttgggtttttcctgttgttgttattgatctttagcttaacttccactgtggtcagagaagacattctgaaagatgtcaatattttgaaattgttgagacttttttcttgttatgatatattgattgtaataaatgttcttatgttctttgtatacttgaagtgaatatgaagtggtcattaggtaccattttgcatacatgacattagattacatatgttaactgtgctgtttatatcttctatatccttactgatttttttatttttcactttttctgctatgtgtttgaaagagatgcactaatgcctcccactgtgagtgctgatttgtacatttttttctcattgttctgtccatttttgtttagtttattttgaagctatattattaggtgcacagagatttaggattgtgctcatttcctattggacttatttatttataattatgaactgtctcactttatctctaataatgtttcttgccttacagttcacattgtctgatattagtatagctagacagctttaggagcaggggcaggtttgtgtttgcgtggtatatttggctttcctttcacattaaacatttctttttattagatttgaagatttgggtttgttttttatctaatctgacagtattttacttcaaatttagcttatttacattcagtgtaatcactgacatcattgggcttatagctaccatcttatttttcattttctattgtgctcttttcttttatattccttttgttgtcattttatgttctttttttcgccctctctttcctctatttttttaattattcaaggatttcattctaaaaacttgcaagttttacttctttaattctaatagtaactatcctagagattgcaatatatatccttgatttattacagaattatacaaattatctttgccactcctctgatactgttagaccctttgaccttttaaatgatttatccctcctgattttgttctttttgccacacatcttagttctacatatattttatactacaaacgacgttataattactgtcttttataatcaatagtgacttacaaatatccatgtttaccctcaccagtgttttttattccttccttcatttccatgtttttctgtctggaattctcttttctttctctctctctttcttttttttttttttcttttttgaggcaggtgtctcacgttttgtcacacaagctggaatgcagtggcgtgatcatggctcactgcggcctcaacctcctgggctcaagcaatcctcccacctcggcttcctgagtagctgggactactggtgtgtgccactgtgcccacaattttttttttttttttttttgtagagacaaggtcttgctttgttgcctaggctgagattattttccttctgcctgaagaacatcctttagttttcctgaaaacatctttattctactttcatatttgaaggatatgattgcaagatataattctagtctggcaattattttctttaagctcttaaagttgacaatattgtcttctcgcatctataatttatgttgataaatcaactgtgaatcttattgttgcttctttgaagctaatttcttttttttcttctggctgcttttatgatttttctctttatctttggttttcaacagtttgactatgatgtggttagctacagttttctttatcttgctccttgttcttacatcaatacatagatattcttatccattatctctttgaatattgcttctcctctattctctctctcctttttggaactccaattatatatatgtgaaaagtttcatgtgtatcttgttcttgccattgtttccattcttttttctcttcctgcttcaggagtagatactttctatttatctgggttccagctcactgatccagcccattattcactaattatgctgtgtgtcatctgctgtaaacttatccatttgaattcctaatttcaaatattttttcagtgtttagagttctaaaatatacatgtgattttttcacagattccaaccttctagtgaaattctccttttattcatcatttcactatttatttttcatgttaatcataagtattataaattccttttctggtaactccaacttttggctcatttgtgggtcagacagatctgagaagcttggtttttttttactctgtctcaggtactttatatttagtgtttacattcctagccagagaagcatttatgtaaacactctctatatttaatgactcagtttaagaaaatgcttacaataattgaggtctccttgtttctgaaccaagttttatatcagaagaccacatcctcatctcggggagaagagcgaggagagtcattgtctaagcattcctgagcactacgtctgtgcttcagtgttccagccccatggaaaacccatttctgtacagtatcatatcccatagttaatcatacttttagattttttaggaatattttagtgtcattgctatttagagattatctgtatcttatattacacattagctaaacatgctctgataatataaatgttatttgagctaattagataaactttgatttcaataattgttcatctttaaaactgatgcagctttattttaggactaaaggattatttatcttctttatatataatacacattatatattatatattatatatggatagatataatagtaatgtaatgtgtacagctgttcacataaattaattcacctatatttagcttcccctgtatcctgtcctcttaagcacattgagggcagaggcagttttcttgtatcttgtcactctacagcacctaacacaatacctttcataaacataatctgggcttagcaagtctgtggattggattcacttgcaaaatctatccattgctttaagagaaaccaatatttaaaagtagacttttcgttaaaaggatattacagatattacttgctttgtttaataattatctgctttggagatgtgtttgcatttttaatgagtgctttaatgagcttctattacatatattagaaaacaaacttggaatagtgccactatgtaagttaactctgctggtttaaaatatatttgagatggaatttgattaaataattaccaaaagtagatatgtaagactgtataagattgctttagtagcaagatcaggcagcaatattgattttttaaattaagtactaaatatacccagtcgaattcaaacacttactaaatgatattttgcaattttcaaaaagccctaacatttagcccctcagttgattcccttaataacttgataaattaggcaaaaaagcaaagaagaagaggatcatggagagcaagggatttacccacatttacatttatattggcagagtcaggacttgaactgaagtctcctgaggcctaatttgatcttctatctgtatcaaccagaaatacctaaaataactcatatgtctataaagataaatgtacctgtagaaaatacatccctcaaaacacacatttaattacaacttcttaaacgagcaccctcttcctttttcttacagctctttatccctagagtttaaagaatcaaaacacacataaacatctccctagagcaaacatagggagtttcctcatgactggaagcccacattaaagccacgcctaagggaagaagggaaggcagggctgataatattttgtttattttagtccttctgcttagtttttgtttgcaggcactggactgaacttagttttcagagccagaaattatcattgtttgtgtatctaaatttgttaatactctgcttttagaaatttttatgtacaatggattccaagagtattttgggaacttctcagtggtgaaatctaaactgtggttcagtgaagagccgacaaacacaaactgcaaagagcagttggcacagtacacttttggaggctatacgactcttctgctcttctagcacaaggcacggagtaggtgcttgctacagttttcggatgaatgaatgaaaagtaccttagtccccagcactgtctcctcagttcacccaaagattccctgtgatggccgtgccaccattacagcagcagtttattttctgtgcaatttgtagaagaagaaccagaaaccaaattgttacccatgctccaaattgttatccatgctccaaagactattcttggttttatgccatagcaaataaggtcttaccatttccaagtaaggctagccacatgccagtctgtgaaaaggaggcatttgcttttgggtagtagttgacatgctttggggcatttatgctgcctccccagctcccatctcagagaattcctgctattcacagtcgctgctggaaaggacaggcttaagtggccctatccccactccatgtctgccttgccccactccaatgagaccaggggtagactcgtggaccacaacaatcagactctctcttacgattctgagccgggttacagaaactacggtcagtgactatggactgcagctgagagctcccaaccagcgagggctgaggttggtgccagtgcaagccaaagtcaaggacaactaaagctacttaagagcaagattataaatagacaaagccaaagtctatgaacaaaggaaatcagacatgcttttaaaaagcaaagagtatgcaacactcacagggaattaataacaatattatttattaatttatttattttatttatgttttgagatggagtctgtcgcccaggctggagtgcagtggcacaatctgggctcactgcaagctccgccttccgggttcaccccattctcctgcctcagcatcccgagtagctgggactacaggcgcccgccaccacgcccggctaattttttctatttttagtagagatggggtttcattgtgtaagccaggatggtcttgatctcctgacctcgtgatccgcccgcctccgcctcccaaagtgctgggattacaggcgtgagccaccgcgcctggccataatatttttttaaaagcaaagagactcaaaagagagagtcaaaaaacaaaagagagaaagaaagagtgggagactacagaccaatcaacttgagtttcagtctctctctttcccagctttggtggctatgaagtctagctggactttgtttcctgctggtggatgtgtgcaaaattgttggcttaatctttacagttaactcctgtttttaatttgagttaatttgagtgagattcgattcccagccaccactcatctctgaccaatggacttccccgtccccttctcccctgcgaaccaggtgcttcagtttggcccttctcgctcctatcaagaaagaatgggatctgaaaaactttcacactgtcaaatactgagtttgctgacttttccagtaacattttagaagagcacagcagtgagaaggccacatgagacagtaagggataacaattcacataccattttgggcatcagttgtaatctatttcaggaggagcaccggaacaccggctattacctcagtagcagatcacttactatcccctttttgagggctacttaccatcacacataaagcttttccttcctgccacactccgcacaccacatactacataagctcttctgtccattgtaaatgccttgaaagcggggatcgtctccactgtggttttatactcactgctctcacactagcagtgacaacatccatttgaatgaatacatgttctacatataattttaatggatattccttctccctctctcagaatgaatagtttgagaacttctgggcctaatattcagataagaccccctcaaaaaccttccttttcccttttgccactccctctgcactaccatgcgcccttgtacttctgtgagatctcctaaaactgaagagcatgaggaaaacaggaaattactattagcttttccttagtccaggaaaaaaagactgagaggtggcccagtcatattcataaagtgttgcttaaagaagccactattagcaattgaaaaggactttctagttcagccctgcctcccattccatctgggcacctccagcatcagcccacagtttctcaggctccaatccattccatgccagtcataaagctgactttccaatgaagacacaaggcagagagcacatttgcatcaatgcaggtacaggtgtataaactcagtgactccaagcggctacactgagcaatgtttacatacttggaaaaaggaccattctcacagattctatttaagaccaatgtggaaatattaatagaaattcttgaatctagaactattcataaatactgttttagaagaatgtattttcattcagaaaggaacacagtttctgacagactgtgattaccgttttatttcctttttctatatcattaaacgcaagggtagtattcagaacactcaaaagtcatatatggaaagaaaagaaaatgatgtttttggcatgcttggatctctatcatattatgttcttgtcttttctggtacaattgtaggatttattttctaaacattccaattttacagcatgagtcattgctaatgtagaaaccaactgaatcatccatccatccatcaatgaatattcttgtcttctttttccttatatgtgcttatctttatactaaaaaagatattaggaattcttgcatttaaagcacttcttctccctttcacttattttgtttgttttacaggtaatacagtaaagctatcattaactttgttttggttcagatttccattcaaaatattgagtcagaaactcaaatcaagtgtactcttaagtatctgaaatctgatgtcttccatacaggaggtaaatataaagtctagaaaaaggagaatagaaaagaaatattttcacactttctggccttaagaaagaccaaacagactggattgtggtaataagtctatgtcttcttcacttagcctttaagagttgactaaaagttatttgattggccaggcatggtggcttatggttgtcatcccagcactttaggaggccgaggggggcagatcatctgagatcaggagttcgagaccagcctggccagtatggtgaaacactgtgtctattaaaaataaaaaaaattagccgggcatggtgatgcatgccttatagtcccagctactcaggaggtcgaggcaggagaatcacttgaacccgggaggtggaggttgcagtgagccgagatcgtgcctctgcactccagcctgggcgacagagtgaggtccatctcaaaaaaagaaaaaaaaaagttatttgatcatcttgtttcaaatatgaagaatctagtttattccattccatcttaaatatatcacctaggatacttgatattgtaatataattacttgttaggcacatcttttattattattatctataccagatggtttcaaggagaagacatatttacttggaaccaacctatggtttgaggtggggctggggagtgggcaagagcactggtccaggagtcaagagaactaaatgttagtcactgtgataccaccagtgagtgaagctgtcacttactgggctttcttgttcgttcgtttctttttcagtaaaatgaatttccttcagtgcctgaaatctctttctaagactcaatgactgagccttttcctattgtttatctcttgccccaaaacttgtaacacaaagtctccccaatttttatgcacttaacaatccactgttcagtagccattctacattacatgcaattatcatcatgagccccctttcccattctgactatatggagattatatggggaaaactataatatggatcacagggaaaaaactgaattaaaaggaagatttggtccgggcacggtggctcacacctgtaatcccagcactttgggaggctgagacggccggatcagttgagattgggagctcgaggccagcctgattaacagggagaaaccccttctcaactaaaaatacaaaattagctgggcgtggtggtgcatgcctgtaatcccagctaccggggaagctgaggcaggagtgtcatttgaacccaggaggcggaggttgcagtgagccgagatggcaccattgcactccagcctgggcaacaagagcaaaactccatctcaaaaaaaaaaaggagggggaagatttgaatttattatgcattatttctaagagagaactcagagaaatcatttgtcctaaacaatagcttctatctattgactcccaagtagttcccaagaaactaaattgcttttaccaaattatccttttaatacatccatgttatagactcatcaactacctgttcattaaaacacatggcctaccaaaattatatcttaacatcattagcttttaaatactagaagtcatttcaacccttagaaaagtctggtgagcatgattacatgtggaaactttcagatacaatgtatccaaaaaagtaagtgtattaaaaatgtaaatatatttcagatatccaaaaatgtagacatattgtcaggctttgctacttttttgcagtttcacatcatgtctttacttgtaataatatcaataattgctgcaaagataataaactacattcccattcgcctatccctctaccccagtactgtgttatacagttttccctgcaacatgatgtcagtctgcaaagggtctttgtgacatcaggaagagagtctagatttccttccagggcaacacattttgctattaggttgagccataaaactgccatttttggtcaggaatgatttaccactggtagtttcatatggcacaagctaaagagccttccttgggtttgagttacagtcctgagagtcgcttgtgtgtccaatgggccagttacttaattgctgagtcttggtgtgtgaaatggtaataacacccactttataggattgattattaactcaacattgaggcttagcaatgacgtataggagcaccgtgcctagaaacagttattgttcaagaaataggtaataatacaatataattatcagtataagtaacgtagaagagtttcctcacttttcctttagccatttttgcatatatggtgaaggtaatggttgctatggtagagagaaatggaaaatatttgtgaagcaagcacaatttttaaaaccccaataacgttaaaggccttccattcctgtcttgtatgctctcttatgtccaagtaagggcacagataaagtttgacacatactcggtggagtatctaaatagaaaatgtactgaagcaaaccaagaacagagttttaaaaaaaaaatcaaagcactaagcaaacattctgaacttttggcagaggaattggactgtctgaatctccatgactctttggagttattaatagtgatgcattttgccatattttgagcagatgcatatttataggtcacgcaatatctgtgtggggagactttcaaggctttatggccttttaaaaatgtcttatcttggaagagaacagggcaaggaggatgccattttgtcatctgtgcagcaccaatcaccctgtgctcattaaatgttacgggaaagatgcgcactgcagcagggcctggaatgtggctcccatctgcactgccagaagccatgatgaagtcacgagttgcacaacagtagtaattcgcagctatttatgaccattttaatagcaaaggtctagattagaaggctgtgtttacatgccatgtagcagaatagttcacgaatcattcccacagtaacgtttggtcaaaccaatcaaccaagtaatgaaaaatgaaccggttgttcttgaggttgtgactaatagatctctaagttagcctctactttcctcatgctcttccatacctgagacagaattgactcctgccccatgcccacagactctcctcctctgtcttcccggcaagccacagccctgttaccctttctccacccaagctcaaagccgtaagacatcaggtaagttaaaggagctttggaaactcctgtagagcacctgtgcacataattaaggaaacataatttttagcacgtttattttctcattgtcattgctccattatgtgactttaattagtgaccccgatggcccctgtgcatccagatgagtaaaatcctttcatttgtctgcttaaactgacttgaggttttagtgattatcacatccatgcagcctgaaggtcagactatttccttttgtttcactagacagttaatcccctcattaggggtgatggaaaatgaataattaaacatgccattttcacatttcaggtaatgagaggccctaagatcccagaggatgccataagaggaaaagtcaggggagtgttgaagactctgcctcctacaaatatgtgagtttttctcccctggcttcatggtagaaaaggtttggcgaaggctcttcctctaaattgaaacaaaacaaaatgaaaaccttagttattgggctgtactctgacacttagtagctgtgtgacttggggcaaagcagctaaccttttgacactaaaagttttctcaattatataactggaatgataatggtaaccattgtattgaaatgttatgagcattaaaaacatgaatgagtgacaatacttacaacagtgtctaccacatggtaagagctctgtaatgtgttaattatattatcattttcattatcacccaggcaagtcacctgaatgctgtgggtatcaggccacagccaaacaaccacttgcaggttatcacaaagttccctttggcctattggaataaggattaagagtaaattatgttgtaccctggagggaaaaaacccaagtagtcatacctctagggccttagggaattcaactttcaccaaacctcttctaattactctaaaaagattttttggagggtggaggtggtagaaggtagagagccacaatagtcgggacccagatgaccacacttggtgagtgaaggtgaagccacccacagcagcctccactggtgcaatctgaattcctgcctccaatcccaggccccacagcttctgccccttcctcatgttctccaactcccaggaagccggctcgccccgggcttccccagccctgtaccatggagactgggcagggacctccttttgtactctgacttctgtctcatctgaccatattttaggcagaccttacgctcatgccgactaaaaatggactcactctgctaaggaaatccaagccccattgggaaatatctctgagtctaatttggtcatttcttttgccgcttcaggctgtggaccttacaaagcagagacagcacccttcaagatgcagagttcagggaaagctcctatacagaggggagtgggagtctccgctgagtttggaaagatgactggggtttgattgacagagtgaacgcggtggggggcggcgggggagatgtttcaagtgaagagggtctggaatgtgcctagaacagggaatcttctgacaggctgaaacaggctgtgtaagggagtgcaggtggctaaagctgctcagagagacacagaccagtgcggaaagaaagttctgagggttcatgaagatattggactttattctgcataaatacagatggtgaagggtggaagcagtgtttcagaaaagaaaaagtgtgtagtgctgtgcatgcagcattggtagaaatgggcttgatgggaggaaaattacttagcggactagggcctgaggtcatggggacctatgaaaaggaaaataaaatgcatgagggtggctatatgattatgtgcagagggggtggaaactgttgctcaaaactgaatcttaaaatttgttttgtcattgctttacccaaaatagtcgaccctagttggatttttttggagaaaatattttgtcccttttaaaaaggttctagtaagaagcagctttaatgctgtttgtggaaggaaaaagttacaaggagaaagagtgaatacagtgcatgattaaaggagtgatggaaagtgacaatggctttcaaaagagcacaggcgaattgacacgtattatgacaaacacgatcttacagtgacttcattttcttgtgagtgttgggaaatactttctagatattctaataatgatgccgttagcattgtacaatttttaattaaaaagctt

SEQ ID NO: 281 - DNA, 185035 bp, Homo sapiens
  Genbank Accession No. AC004770
tttggaaaagcagaaccttttttcgtggttcaagaaatcaaagtcttcccgggaggtctttctgtaaatccagagctgcagatgtttgaccgtgttcagagaggggcccttgtgctgggtgaagtggatggggcacagcaggcaatgggtgaaaagcaggacaacctggggccctgggaggaccagggagggcccatgtctttgactgttcatcagccggctgacttcctgtccgcctgtcgtctgctctgcccatccatccgtagtccttccgcctgtctctgctggttgccgctgtgctactcagctgtgtctgtctgtccgcctgactgtctgctctccttcaggatgccttccgtgccttccatcaagatctcaattttgtgcgcaagttcctacagcccctgttgattggagagctggctccggaagaacccagccaggatggacccctgaatgtgagccagagccctaggagaggctcagcccctgagggagggggatggctggagggctgggagacattgccacatggccaggagccgctccctcggcattcgcccaaggggatgcagagccaggggtgagcctgccctcccctcccagggggcaggcagttgaaagtgaagctgtagggatgccctgagaagtccagggctccagatctggtttagccaggcactcgtttggatcccgaggcaagctccctccctgttgtcgcccagtgtccccatcaaaaggaggattttgatgaactgatttctctcctggctgtagcgtcttacccaccccataccttttgggagggagaggaggcttcaccaccagccagtgctccagctcacaccccgggctgggtactcttgtcacttcattcctctttgcccacaccccttgggcctggcgatgggaggagcggctggggctccaggagaatgggggtggggaggaatttcttccttggctgatcggcccctctgctatggcaggcgcagctggtcgaggacttccgagccctgcaccaggcagccgaggacatgaagctgtttgatgccagtcccaccttctttgctttcctactgggccacatcctggccatggaggtgctggcctggctccttatctacctcctgggtcctggctgggtgcccagtgccctggccgccttcatcctggccatctctcaggtgaccccagttctgtgttgcagccaccttaactgcccaacagacgtgggcccccatgcatctgggcattgtgaacatatttgctaaatgaatgaatggacctatgaaaggatgaatggatgaataaacagatgaatgagtgaacagtctgaaggcccatcaggcatgtctgtgggtcaagctgcattccagatgagccaagaagttccttcttgaacagattccgatcaagcacagggccactgagccagaggctgctgccctgcagcttcatgacacttacgagcccctccacctccctgggactcagttctcatctgtaaaaagaggacactggcccacaagggtcttgaaatggagcattagcacgggggtaccctgcaagctgaaaggattcactggggccccaggccctggcgggctccgtccttcccaacagcttctgaccctgcctctctccccaggctcagtcctggtgtctgcagcatgacctgggccatgcctccatcttcaagaagtcctggtggaaccacgtggcccagaagttcgtgatggggcagctaaaggtgagggtggggtgggtggtcagccaggtgctgggtggcgctgggtctgcccaagtgtgtgggcacagtcgggggcacagcctgccctgagagccccctcctcctccacagggcttctccgcccactggtggaacttccgccacttccagcaccacgccaagcccaacatcttccacaaagacccagacgtgacggtggcgcccgtcttcctcctgggggagtcatccgtcgaggtgggtggggagggacgtggacaacctctggctgggcctgcagctgagggggagctaatgcactgggtccccactctgcccctgacctagcccctgatctggcctccactctggctgggccaagctctgcccccgtgtctttccttcccacctcccaacctgctggggacgaccagcccgcttgctagaatctagagttgcctttgacccttggccccagccagccccgtgaccttgcccgggagaaggaggtggcctggagagctgctgtctccagccgccgcctgtctccacagtatggcaagaagaaacgcagatacctaccctacaaccagcagcacctgtacttcttcctgagtgagtgtccatctgtccttctggggtgggggagtgcctgggcctgcactgtcctccctgctgtcctggaccactcccagccacttcctggggcggggcacgtctgtcaggtctccctggtcatggcatcctcccagcctctgcagtctgtacacactctcccagcagcatgcctttgccccagctgtctcccgtgcctgggacaccttgcagccacgggccatcacagccctgctgggagcttccccaagccccacgtagaatttcttcttgccctcactagagtggtccggagccctagagtctttgggcagttgttggggcggacagagtgaggactcaagtctggccctgacttgcggtgaagggtggtgggaggtggtggggtaagggcagcctggggaggcttggacacagaattgggggtgatatggggtcattcagctggatgtgaccagcaccaacgtcccaggggcattcctggagtaacagagcccctcactctggcgcccactcaccttggcagcccagccccactcctgaacactctcatgccccttcttgcagtcggcccgccgctgctcaccctggtgaactttgaagtggaaaatctggcgtacatgctggtgtgcatgcagtgggcggtgagtggggttgcccaggaccccgggcatacggctgccgtggcaggaggtggtgcctcgggggacagtacctgcccatgaaggcaaacagggtgcacatgtgcgtgcaacagtgtggctcacatgtatgcgtgcaacagtgtggctcacatgtgtgcgcgcagcaggagagcgagtgtgcccgtgactgtacgtgtggtgggggggggttgaggaacagggggggtgtgggtctctctcggtgagggtgtcttcccaggaggagttgctgggccgactctgccaggcatctgtgtccctggcagggtcttccccaacacaccctgcatgacaccttcgtcactaaaatcagcctcgtgagctggcagggcaaggaccctgttcctttactcagctgagaaaaccagagagggtggtggcctgtcctgggctctgaggcaaatcaggcagaagggttggatgcctgaggtcctcctcccacccaccaggcctccagacctccgggcacctggagacctctcggtatcgcctctgccctcctctgcaggatttgctctgggccgccagcttctatgcccgcttcttcttatcctacctccccttctacggcgtccctggggtgctgctcttctttgttgctgtcaggtatggcagggagtggcgaggtcacacacaggcgacaggtgacccccactgcagccccccaccagagcttcccttttcccgtctgcagaatggggccagtggtactgcctccctggcttgctggtggaatcacataaacacaagcgtggcaggagcccagggtcggtgggtttagggagcgtggcctggcttgtaagtggcccggtgggtgtcggagctgctctggactcagcctcacagtggacactgctccattcagattctttaaacactggcaagggggcgatggccacaatcctattgtacagataaggaagtcaaggccacttggggacagctgctctccagcctccactcagggtgcctaagtggtgagctggacctagggcagtgcccgagcctccccacagggtcctggaaagccactggttcgtgtggatcacacagatgaaccacatccccaaggagatcggccacgagaagcaccgggactgggtcagctctcaggtgggcagcaggggtggggcccatcctgggtggggtggggggtcccagctaggagccagatggcaaagcagggatgaggccctgacggggctgccaggtgggggatggtgccgtggggtcagggatctgcaacggcctcctcacatgtgccccgccggcttccggcagctggcagccacctgcaacgtggagccctcacttttcaccaactggttcagcgggcacctcaacttccagatcgagcaccagtgagtgtgggtgctgggggccagtgggaggtggggagggggtcctgggaggggatcctgggaggggacccgtgggtggggcctctctctggaatctcccacttcaggtgccagcatacgctccccacccccagcctcttccccaggatgccgagacacaactacagccgggtggccccgctggtcaagtcgctgtgtgccaagcacggcctcagctacgaagtgaagcccttcctcaccgcgctggtggacatcgtcaggtgaggctgcagcccggcccctctgttctggtggcttccccagggcctatgcctacccttgtccaggtcagcctcatgctgagcccccagggtccctgagcctttctgtccacgtcccatgcccttcctcccttccccagccttcacgcacacagtgagaatttctggagcacctactgcagactcacaaacagcagtgcctgcggtgagcaggtctatgcaaacctacccccaaaggctgagggaaaaaagctaacagatccagtttctcagaaggaaacacttaacagggactcataaacagaagccatgtctcagggccgggtgcggtggctcacgcctgtaattccagcacttggggaggctgaggtgggcggatcacttgaggtcaggagttcgagaccagcctggccaacatggtgaaaccccgtctctactaaaaaaaaaaaaaaaaaaaacaaaacaaaaattagctgggtgtggtggcaggtgcccataatcccagctacttgggaggctgagggaggagaatcacttgaactcgcaggggcggaggttgcagtgagctgagattgtgcctttgcagtccagcctgggcaacagagcaagactctctcaaaaacaaacaaaaaaaccatgtctcaggcagccaagagttgggacatcccctcacacgccctctagaaagaaccctctatatagcaagcttttagggtgaaccccatgcaggtggttcttatgaacctggtgaccactggaggttagataagcgtctacaagaggaggttatctatgccatgagcttggcattcagggtcaagcatcggtcatcagacagttttgcttgaagatggcattgcccttgtagcaatgcaggctctagagagcttcctgccctcttggagctgatgttccttccagcaaaggaaacagcaagcaattaaaataacaaataagtacattacagaagatgggcaaaagaacaatgaaaagcccctcagggtggggacaggggaggggaggggggcggccaggcaggggcggcagtttctaaataggtggtagggtgggcagtattgacaggctgacgtgtgagcagggacagggaggaggggagaggtctcgccacagggacatctggcaaagagcgttcaggcagagggcacttgaccctgaatgccaagctcatggcatagatagccgaggcaggcatgcaggcactcagagaagggacacgcccggcttgcatcttggaaagctgcccctactgggaatgactggcgggcaggagtcgaagtggaaaaggagagcagaggacactgcagccatccaggcgaggggtgatggggctcagcccttgtggtcaccttggaggtggggaacagaggccagattccaggtcttatacctctgcgcctttgtacacgctgttccccttacttggttgcccttccttcctgtgctggtgttcagatgcccacttctccttcatgatctctcccagcctgatgctctgagcccctgccatttggcacagccctttagagcgcctggcacagggcttcctagcagattgttgacatttctggctccactgcccaatatcaggcccaagatcgggtgggcaggttccacgtcctctctgtccttgggttgcagcgcccagcaggaggcagcaatggagaactgggtgcaggagggacaggcccacccaggctcatgcctggacttggccttggctgccctccagctcccctacccgacacccgtcaacccggtctagattccattccagagaatgagcattcagctgttctcccaacccaccctccagcccgcatcgctgcctgcccccagggaagggaacccacagggaatggggatctccgctcacacttaccatgggggatacaggggtgttaggatcttgcaactgagctcctaacacccacccccactgccacccccacctcccaggtccctgaagaagtctggtgacatctggctggacgcctacctccatcagtgaaggcaacacccaggcgggcagagaagggctcagggcaccagcaaccaagccagcccccggcgggatcgatacccccacccctccactggccagcctgggggtgccctgcctgccctcctggtactgttgtcttcccctcggccccctcacatgtgtattcagcagccctatggccttggctctgggcctgatgggacaggggtagagggaaggtgagcatagcacattttcctagagcgagaattgggggaaagctgttatttttatattaaaatacattcagatgtattatggagtggagtggtgaatttgcatgagttttgaagctggggtctgcccagactccccaacagcattcaggccctcggccatcaatgtgtgtgttggggccggcggcggggttgagggggagcgctaaggagctccctttagctctagatgccctgggcctgggagcccagggatgcctggactcggacctgcccgagggcctattcacttcctattcatgctgggcttcaagtcacttgacgcttctgcatggtgggatgagcgggcccagcagatgaggacccagggctgggggccatgtctgcggacgcttctggacatggactgggaaagacggttgtgcctcttgacctgcactggcctcccacagccctccatgatggggggcctgaaagggccccgcgcagcgggccacctgctgatcttagcgccacatctggcatcacaccagtggtggtggtgcagcctgtgcctggtggcccaaggaggcaacgtcgatctccctcaagcccacctgggaccaggtgcttgtctgtagttactgcagtgaataggctggacccccgaggcatggccattcctgtccctgagtccctggagtcaggtcttaggctctttgtctggcagtgggctggactgtgcctgtgggtttcggacagttctggggagggctttgagttgcctcttggggcacccagaattgggaagaagatctggctggaccaatcagtccccagcatccacacagcctgacagctccaagctgagctgagggtttcatctgaagtgtcggcagtttgaaaaagaaagctgagtgaggatttctatgaggcctttctggagtgggagctggggtcgccctaccagctgcaggggttgccccctactttttgggcttccattggcctggactgggttctctttgggaggtggaaaaggcgcaaattctgccaatttttgttcagcccctccaaggcccatcctccgtgggacggagctggaggggaagccccactgccccatcaacccgccccctactccacacacatacaaggtggcgctgagtgttgctgcccatgaacttctcttccgagacagccagaaagctcctcagtgctaaagctgatcaccgtagtctcacacctgcttcctctctgtgaggaggggccgtctgcacattcccatggactcttgcggctcttcccaggggctccccttctagaaagttctctctgacccgcagggctcctccccttccctgcccagcctgtgactagggtctctgtgacagcacctggaatactgacatcatttgctgctggaggctggtggcagcccagagcctggcccgggagaccctggggtgtgttttctgagaggatgacagacagggtgtttgggtcctgcttccctcaccctgatttctggggcaggagagcactgggggaggtcctgttcggctcacataatctcccagacccaggagcagacagcccaaagctccctgtggcctcccggcccagggcagtgccagcagaggcctcctggtagggccagggaagcagagggtggcagccccttcagcttggttgtgagtgagatgcctgccctcctccgggtgccacccagccccaccagatccactcaagtcagacagacttgggggtggggtggggtgggggcaagtcctgtttctgccaggacgcaggctgtgtgaccttgggggagttccttgaccccgagcagcagtacctagggtgatggaagaaaggctcttagcaaagggcacagcagcaggctcagtttattcacaaattttgtgcacacaacccaattccccaggatgaccatttgctctgtcacctagggcaagttcttttttgccttccctgagcctcagttttcagccgagggtaagattggatgctccttgaaaggtacttcctgcctcagacacacgcttctcatggccagggcgtgccttgcattcagggtctctgcacaggctggtccctctgcagggactcccccttcctgtcaccgcctgtttaaatcctgttggctcctagtgccacgcgggcgccctgagccagcgcaggctccgaatggcattccctccgtccacaccctggtagagatcgctgtgcgctggctccgaggcgctcgccagggagatgctaacaccgaggatccacgacagctgagcctgcagcgccacccaggggcgcccggagcatctgcgccagtgtggggcgggccgtgctccctactgtccctggtaacttgctttgcggacccctgggaggccccgccttcagcagccactcctagatttctccagaccacctgggacccatcactggcaggggaatctttgctcttgtcccactgtcccccatgctagatcccctgggaacaggtcaccctcagtcctgagctgagctcccccttctccatctgtaggtctcctagtctcagaacaaaggcttagggcacaggggccaggtttgtaaaaggaaagaggctttggtggaacctctgaacctctgagaaaccgtgttccttttttattgtctgtacaagaggcgtgggcccggaggaaaaacagctcccgagggaaaccataaccgcagtgttggtttgttcctttgatcatcaacatttgctacgggtctcccagcccaggcagatgttggaaatgatgatgcccaagagccagcccctgcctggtgtgttgggagtagctggaggggagcagggggtcaacaaactcttttgtgacgggacaggccatgggtttctcaaggttcctccccccaccacactatgtcctcaggcaatgagccaccacaactactgggagcttggcctattccaagctcttggctgctgtcactctttctcttggacacttgctcttgaatgggacgatttagaagaaagacctgaatgcctttaaaatccaaagcaaagtgtttgtgatggtggaggacgatggggacgtgatcctgaaatctcagcacgctggggggctgcttgttccgtgtatgcactggccacatgaagccagtctgctgagaaaaggaaaaccagtcccgagggcagtggcgtttcagcctggggcaagccatccccacggcgccccatttccctctcagatgttggaacagggactctttgagaggcagcttctttggccagaggggcacacctctcgggggagggtgcagcctggctcgctgaggagtcccgatgggcccaaggcactgtgtcacataagcaatggccagccactcctgatggcagcccaagcccagccccagtggctgccagctctgccctggtccagcttggtaaaggcttcctctcccctccgagtaggcacgagggcttcggagtgtccagccagacaccccgaggatccgcctgtggtgccacagcaccctcccccgccccacacacacacagcttagacttggggcgctgcagatgtccccgctacccacaaagctgatacccttttatctgcgtagctacactgcccttatctcctcctcagagactaactgccctccactgcccccactcctccagccagccgctgggcctcctgggagctgtctgacatttgacgtgatgggggcaaggtctgggaaccagccctttctgtgcaggagaggtggccaggagcctgcgggttaggagcagggtcctgctgctgtgtggcctgcgcagtcctgtcctctctctgggctcagcctcttcgcccatgatggtggtgttggggtttgattgctcagggccttgaatattggggcaccatgactttggcaggggatagggattagaaactcacaattctgggtgtgttggcaagggggtcagctgagtacagggacaggagggggcggttaagcagagagcagatatgaatgtcttcagcttcttgacccagggaagtattcaagggcaaggcggggctgggtggggctggggaagtcagagaagctccaagtgcccggtgaggctaggccaagatttatctggtgccctcatagccccagcgtccatctggcctccagtatccccaattccaagccccctggttgttatgggtgatggacccatggatttccaactggtagggttgggaggcctgggctggtcgccatcctggaggcgggtcacaggcacagggcagagggtgggagccgtgcctgccagggtcttgtaaccttgaaggccactgccagcgggtccaccaggagggcaaggcctagggtaagcgggtgttgagataatggcatccttggggcccctctagcctgcccctgtggactatggcccacagggccagggagggcaaaggactccccagagccacttggtgaatctggggtgagtcggccacctcgctcagggcttctgtaatgccaggccctactcaggacaccctgtggccactggggagccatacgtaccccagccagtctgctggctgtccctacctggctggatttcggccaggcaaagcgggggtcaggggaagcaggcgggggctgaggtctactcaggagccctccccagccctgctgggagcagctacaaagccaaggggaggccccaaggtgttaactagccagtgcctcttggcccttccttggcactttcccaggatcagccctgccaggaaagccagcccagagacgatgacggagcagcatgggggtccatgggagacggactgtacaagtgcccctggcatgttgctttagactcttcccagcctctggggtcagacagacctaggatccaatctctgtgcctatgaactggtgaccctgggctaggatgatatcagcccccccgacagcctgtgggttctgaatgagccattgcatatatgggcacgggagccacaaaaagaatcatcagcctccagagccttcttcagcccccttttaatttaatttaattaattaatttatttatttatttgagatggagtctcactctgtcgctaggctggagtgagcgatcttggctcactgcaacctctgcctcccaggttcaagcgattctcccgtctcagcctcctgagtagctgggactgcaggcacgcaccaccatgcccagctaattttttttttttttttttttgagacggagtctcgctgtcgcccaggctggagtacagtggtgtgatctcagctctctgcaggctctgccccgccggggttcacgccattctcttgcctcagcctcccacgtagctgggactacaggcacccgccacctcgcccagctaattttttgtatttttagtagagacggggtttcaccgtgttagccaggatggtcttgatctcctgacctcgtgatctgcccgcctcggcctcccaaagtgctgggattacaggcgtgagccaccgcacccggcctaatttttgtatttttagtagagacggggtttcaccatgttggccaggatggtctcaatctcttgactttgtgatctgcccgcctcagcctcccaaagtgctgggattacaggcgtgagccactgctcccggccttctccagccccttccaaggaggccaggaattctgtttggcctggcgctctgtggaagctggctggcccagggatgggagggcagattgcacttggggagacagctggggggggaggatgttaggaagagtctctgcaagcccctccatgccaccctccttgggtaggggtcagctgctgagaggtggctctcagccctgttttagaattgggctggggtcggctgctgagaggaggaagatgggccaatgtttttgggtcatttccaccaagttccgggccccagaatgaatttcagaggcagcagggagaggcgggtgggatggccacaggggagggaggggatacagagagatgcaagcatggggacccctcctggtgcccaggcccagctagaagggcctcatctatcacccaataccatggcctggcattggcgtgcaggaaacacaggaagtgagaataaaattccttattttatttcaaaaaatgtaggggtggggaagtaacatgataaacattacgatcagctccctatgggttcattctgcctctgcgggggtcgggggcatacagtagctggggggcatgccattgccatggcaacccagatgcttagatgcaggtccctcctggctgcttagagctggggggactaggcgccctccccgaaagcccccattctgagttgttggtgcctgcccttcccctgaatctaagaactgattagtgggttagactgcaacagcagctcaggatcctcccaggacttccctccctcccctctcacttgcccgtcccctcagctaccagcacctccagcccccacctcctcctcttctcagctccaccctggtcctcatgaggtaccccctccccagcccctcagggcagcctcctcctgagactccctcccgctctgcctccctggccctccctgacagtcagggccaccgaggcaaggccatgtggtgaaaggcagattgtcacaaggcccagccctgccgccccctcctatcagaatgcatcctggagcaacaggttaaacacagtaagggcaggttcagacaggagagtgcctgaggcagcgccgtccacacagcagccccgagatggggagggctgggacgagacctcccagctccagtgccctcctgcagcctgcagggcccacgtcccctggggccaaatggccagggattggctggcactgcccagctgataacagagcctttggagaagggtcagattgctccagaatcttggacctcaggacaccctgaggaaaagctggagggtgggctgagcctccaggccagccggcccctccctgaacgtggccactgcctctgctgagtcacaagagacgagggactccccctttggtcccaaggtcacaggctcaagttggggaggcggtggaatggggcccgtgaaagcccagggtcagagcactctagtgatggggtggaggactcttccagggcccaaggtttgggctggctgtgcccgcgggcctggggccctggacatcttaagagaggcctcgggtacttaaccgagctgcaggagggagacccgagctttgtaacaaagcaggcctctctatgaaagggtggaccaatggcagccgtcagggagagtgaagccaggccgggagggtcaggggccctgcccgactaggacctgcccctatgaaccccaagagcatctgaagaaccaaagcgggggtgatgcctagtgaccaggctgcaaggggagactcacaggccagacccatggaccgctggtctcctcccatctttaggggcagagagtggaggtaggacagagccacccccggtggccacctctctgctccttggaagaaggggctaggaggcactgggagggccatggctgatggctgacggctgagggagggcaggtcccatgagggcagggtgctatgggggagatgtgaagagaaaaaggagaggagaaagggagaaagatccaacatggggtccgtgagcagtgcatacaccagcctctcggacacccctcagaacaaaagcccatcattcctctggccatcaccccacctgcaccccttccccacggtgtcccgggggctgtggcttcatttgtgaaggtaggcgtccagccacagcttcccagacttcttcagggacctgcaaagttggggatggaccagggtcagggaccaggacgggagtggccccagggagtgcaagggctgaggaggccatcattaaggtggcatgtatgtccccttggccctaaccagggcttaccactgccactgggcctgtggggctgtcagctcagagcccaccaggaaccccacacagaaagggatggtcttctcgcagcccagggagaaaagcccaacagctcctaacacaggctcgggagtaaggcaggtgccctggtgggtgactgtgccaggagggcccagcccctcttgtgatcccactgtctgcaccacgggtgatcccagggcccagcgcctgtggacctccacccctcacctgatgatgtccagcagggccctcagtagcggcttctcctggtattcaatgccatgcttggcacatagagacttcaccagcggggcgatcttgtgtaagttgtgccggggcatggtggggaagaggctgaggagtgtgtagggtgggcagagcgtgaggactcagagggccatgctgctcccgcttcctcccaccacctgggcagaggctggctggggccctcagagaccctgtccacagccaggaccagtctcaaagtgtggctcctcgtgtgtgcccagtggggtgccacgtgtgtggaggggagggtgcagccctccgtgagcaggagggcgtttgtgctctatggagctgggaagatattgggtggccagagacaaagtgtcatgtttttcaaaaaagaaatgaaatagctggggaatgctaggaaaagaggcagtgaggtgaggcacggtggctcacgcctgtaatcccagcattttgggaggccgaggcaggcagatcacttgaggccagaagtttgagatcagcctgggcgacacggcaagacctcttctctacaaaaaataaaaataaaaaattaggccaggtgcagtggctcacacctgtaatcccagcactttgggaggccaacgcaggtggatcacttgaggctaggagtttgagaccagcctggccaacatggtgaaaccccgtctccactaaaaaatacaaaaattagctgggcgtggtggcacacgcctgtaatcccagctacgtgggaggctgaggcctgagaattgcttgaacctggtaggtggaggatgcagtgagccgagattgcgccactgccctccagtctgggcaacagagtgagattctgtctcaaaataaataaataaataaaagtaaaaaaaaaaagaaaaaattagttgggcatggtggcacgcacctgcagtcccagctactcaggaggctgaggtgggaggatgactttagctcaggcgttcgaggctgcagtgagccaagaaagcaccactgcactccagcccaggaaacagggtgagactctgtctctacattttttattttttaataaaaaaaaaaaaaaacagtgacaagaggtgaagcaaggacaaggggcagcagggcagtccctcggccgatgttccaggcaagctacgtagccctgccctgctagcctcacagggtcatgaggtgcgtgtgcaggctccataactacaaagtcccaggcccacatggagggaggtggtaaccactatgaccaagtggcacagcatgaggggcacaggatgaccctcagggagatggaataggggagcccctctcctgacctcagcggggctggctgggagccttgctctatattgggcagagaccttgtcagagagacaaagaggtggcccccacattctgcattctgcccagtgggatagcggccacttccctcccgctgtgggtctccccgcctccccgcagccccgcgctcactggtgctcaatctggaagttaaggtgtccactgaaccagtcgttgaagaaggactgctccacgttgcaggtggctgtcagctgtcagtggaggggatgagtgtcagggaacaaaggaaggcccaagggcccggcctcattcccagggggcccagccttacccagggtctccaggccacccgtccacatcataccgtcctgcctgatggcctcagcccacccagatgccccacctgtccctctgggggattcctgctgccctttcttgctcagccctgaagctcccagcaaaaggacacaggcagccccgggaggcccagcacagccctgtgttagcaggtgcagatcatctggggccaggacatggacattgggaccaggctctggtgaccggccctgacttccctacctggctactgaaccagtcacggtaggcctcctggtcaatctccatgacgatgtgattcatctgtgtgacccacacaaaccagtggctctccaggaacctgcaagagaacacagctcagcgcaggggcctccgggggcccagccacagtgggaacagatccactctcccaaccagcccaggacagcccctgccaaggggccaggatgggaggtccccaggcaaagtggagccgtccgagcctcttctcatgccaaagccatcatcagtgccagtggagggcccagggatgaatcagcaaagcccaggcacctgatgaagttgaggaaaaggagggctcccaggatgccgtagaaagggatgtaggtgatgaagaaccggatgtagtagctgacggcccaggccaggtcctgcggggaaagatgaagttaggtgcaacctgccctctcctctgccctggcaccaagtgcgtgccccagatgtgcacacacctcacactcaggcctctagaagctggaccgcagcccactgaaatgcaatgggcaactacacgccacctgcttgctcggggtttgcatggctgcctttgtttctagggaaatgctgagtgttttagcatcaggaagtgactgtgccctgtttttcgggagagaaacggaccctcctgctgaggggcagccatggggtaggggtgggggtcagcagccctctcgtggggcaagggcgattctgaaggtgcgcccccaacccggggccaggtccccaaccgtcccccagtcctgtccctcctcctcagcacctgggtctcctcctggcatctccttccagcaggacagagggcttggaggggtagggaaggtcagaggtaccatcgtccctatctcagagctctcacagcagaggctggcctccccacgccccactgtcatcctgtgtccctccactctgctctcctccctgcctctggctggactggtgtcagggactgggcttggacgtcttctctcatgtactgggagggtgacttcacggctccaccctgtccactgtctctctgccacccaagtcttgtctcaactggaccacagcatcagcttcccacagtctcctgcttgtcctcgtggccatggcaaccagagtggccttcgctccaagcaggtcccaactctcccctgctaaagcccccaccccacccagtcacccacggagcctcatggggttaagaacctgtctttactcagccccctgacctagcttactccctccccggggcctctgcatggcctgttcccactgccagggcgctcatcctgccatgagtttaggtatggtgacatgccacaggctcagcacaggtgtccgaggtggaaggtgaggccaagggactgccctgtctcacttcaaacgactgaagaacaaggtcacatttgtgtcttaaaatagatccccacccactggagagggggagactaggaagttattccagcggctcagacatgaaatgacagaggcctaaaccagaacccacggcactgacaaggaggtgacagattccagaactgtcagaggcaacggtggctgcatttgtgcctgcttggctgtggggaatctaggctggtcctaggtgatcaggggtcgggtgccagcagctgaacaggaaaggaggaagggagcgctcaggagaggctggagatggccttggggccaacattggccgagggcaggacctcacgttccaataaggtggccttcaaggtgaggagggaggcagatgtagccagttctgctcccactttccatcacattccttctattctgtgtgtgtggtgcaatagtgtgcagtgtatctacacatatatggaaacaaaatgaggatggggttacggattatttttttttggagatgggatcttgctttattgcccaggctggagtgcaatggtgtgatcatgactctgtcccaggctcaagccatacttctacctcagcctcccgagtagctaatttctgttttttttttttttttttttttttttttgagagggagtctcgctctgtcgcccaggctagagtgcagtggtgtgatcttggctcactgcaagctccacctcctgggttcataccattctcctgcctcagcctcccaagtagctgggtctacaggtgcccgccaccacgcccggataattttttgtatttttagtggagatggggtttcaccgtgttcgccaggatggtctcgatctcctgaccttgtgatccgcctgcctcaggctcccaaagtgctggtattacaggcatgagccactgtgtctggccttacctggataattttttttaagtttttatagagatgggggggtctcacttacttgcccaggctggtctcgaatgcctgtgctcaagtgatcctccagccttggcctcccaaagtactaggattacaggtgtgaaccattgccctggcccaacttttatttttaagagacagggtctcactctgttgcccaggcttgagtgcagtggtgtgatcacagctcactgcagcctcaaactcctgggctcaagccatcctcctacctcagcctccaaagtaggtagattacaggcgcgcatcaccacgcccagctttttgtagagacagggtttcgcccatgttgctcaggctggtctcaaaactcctggcttcaggtgatccctcccacctcagcctcccaaagtgctgagatcacaggcgtgagccaccatgcctggcctggacttcttttgagtgtagagagcaacacatacacagagatcgctggtttcaggggcagagagcccaagagatcagaagcagccaaagaggcggagcgagggggttgggaagaagccagcagaggtggggacctggaagccaacaggaagaactgcaagagggagtggccagtggtgtcagatacagcaaaattccaggagggtgaagcgtgggagcatctcaggatccaggacgtggccccgggaacagggaaccttgccagagcatgtaaatctccccgggaagcctccttcaaagatcttagggtttgtcacctctttcctctaagccagggtcccccaacctccacactattggcacctgggacaggctgcttgttgtcatgggcggttctccagggcatggcagggtgctaagcaccatcctggctagacgcccaccagatgccagtagcaccctcctctcctgaagttgtgacaattaaaagtgtctccggatactgccaaagggcagaacagctcccctgagaaccagtgccccaggtcataggtgcgctcctggctctgaaagccccatgggctcatcacattgtccccactctgccatccccttttaggaacatagggtgatttcttttcctgtttaatactttgttccttagggaacaagcacagtcaaaaacaaacaaaaaaaaagaagttgctcactgcaagctccgcctcccgggttcaagcaattctcctgcctcagcctcctgagtagctgggactacaggtgcacaccaccatgccaggctaattttttgtatttttagtagagacggggtttcaccatgctggccaggctggtctcgaactcctgacctcatgatctgcccgcctcggcctctcaaagtgctgggataacaagcatgagtgactgcgcccggcaataggccacttatgagttagaacgggattggatgctagaggcaaggagagggtgtaacatgtataaggagggaaaaaacataatggtgctagtctctaacttgagccactgggtggatgatggagccattcattaacatggagaccatcaggattaggttgtgggagaagaggagaggacttacattgaatatgttggatttgcaatggctgggacacctccaaatggagttagattggatatatgggtccaagacttggagataaaatttgacttggctgctcttaaattcacagtcagggtgaaaaggacaacttcagttagcaagcgataaaacagtaatcaacaggccgggcgcggtggctcacgcctgtaatcccagcactttgggaggctgaggtgggcagatcacctcaggttgggagtttgagaccagcctgaccaacatggtgaaaccctgtctctgctaaaaatacaaaattagctgggcatggtggcgcatgcctgtaatcccagctacttcggaggctgaggcaggagaattactcgaacccaggaggcagaggtttcggtgagccgagatcacgccattgtactccagcctgggcaacaagagcgaaactccacctcaaaaacaaacaaacaaacaaaaaacagtaatcaataaacaagtccacatttggttaagagaggaaaaacttccccatggctattggttggagcatgagggacaaatagactgctgagaaagactggattttaagcaagcatttcagaaagtgacaatttagtctttgataattttcagataaacaatttatctgccgggtgcagtggctcacgcctgtaatcccagcactttgggaggccaaggcgggtggatcacgagtcaagagttcgagaccagcctggccaacatggtgaaaccccatcactactaaaaatacaaaaattagccaggcatggtggccggcgcctgtactcccagctactcaggaggttgaggcaggagaatcgcttgaacccaggaggcggaggttgcagtgagccgagatcgcaccactgcactccagcctgggcgacagagcgaaacaccatctcaaaaaaaaaagatgacgtaattacaatgggccctaatgcaatatgaccaatgtccctattttaaaaaaaaggaaaaattttcaagaatccacttttggtgaagaaaaaaagaaaattaaaaaataggccaggcgtggtggctcatgcctgtaatctcagcactttgtgaggctgaggcgggcagatcacttgaggccaggagttcgagaccagcctcgccaacatggaaaaaccccatctctactaaaaatacaaaaattagctgggcatggtggccggtgcctgtaatcccaggtacttgggaggctgagtcacaagaattgcttgcacccaggaggtagaggttgcagtgagtcgagatcacaccactgcactccagcctatgtgactctgtctcaataaataaacaaataaacaaaataatttttttaaagagggatatttggacacagatacagatacaaatatgcagagagatgatgtaccgagagggaggacgaaagccatcaaccagccgatgagaggcccagaacagagccttccagagccctaaggaatccaccctgctaacacctcagttttggacttccggtctccagaaccgggagaaaacacatcgctgctgcttatgccactcagttcgtggtgctttgtcatacggtcttcgcaaacgaccacacctgtcatctcagccaacgcccagctgctccaacttcaaaccagggtgtggggcaacccagttcatgggactcagggcccacagggagcggggaagggagatggccacacttgcctctcatcctgctgcctttgagaactttctcgggggctctgcaaaagcaggggctgccccagtggactccctatgtctgagggagagtagagatctttaggactaggtcctggtggccccagagggagtcctttcctgagaggcagctaccccagggaggagatgcctggggccccacaggctccactggggcacacgaggaggcagcgtaggacccccgggtccccctgtcccagtcaccctcctccccatgccaagccagctgtgtccccaactcaccacccagttcttatggacgatcatggtcatgatgatctggtactggaaatacatggggatgagcagcggcggcccaactgcaggagagagacaggcgcttagaggcatccattccacgctgcctgtgccggaaggtcaggggaacccaggcccagcactgagtgcaggggccagccctgcagacgtgggcagaagcagccagggaccccggggcctgcagagaaggctgggagcccttgaggacgtgtgtcacccctgggactctctgagcctctgtgtccccatcaggcctgtaacacaggctgaggggtctgcacagcaaggctgctgtggcccccgcttctaacaagtttagtgtcactttctggatctgaaaaagatgtcaggtaggagggagagacacgccactctggggggaggggagggtcccagagtgatttcggggcgccgagcactcactcaggaagaagtattcgtgctggtgattgtagggcaggtatttcagcttcttcttgccgtactgaggagagaggagagatcatgagcacccagtagcctcagctcccagcctcccatgttccccaacccatcctgcagccaccatcccttctatctgctcagggcacaccactgtccctttcctgtcaatctgcaccctgggcccaccaagcctggggcccctccagccctctgggctccccatgctacagccagcagcggccaacgcttcctcagccctagccgagcactggcccgatggcatcgatcctctacaaggccggcacttctgaggctgaggctcagcgttaagccatggcccagggccacaggaagtggccctgactgggatcagaacccaaaaagctgactctgagcccatgtgacaggcactaaacaaatgtttgttgaatgaatgtgcaacagagcaactctcggcggagcataagcacccaggggagttcctaggtcaccatggagagctcccggagcccgcagtggcagggagaacctaggtaagggccccagaattgctgccagtcatcaggctgggagcatctgcctccctggagcctccctgtaatttacaagagtgaatcactcctccccagctggagcctaaccttgaggacagaggaggccacagcacagactcctcaggccacatctggctacctgaggtccccatgacggcaccggtttcttccccatcagagcctgcaccttgggcagcctgatgcccagaggctctaatggaggagggctgggctgggtcctgggcatcgtcattgtccaatgccaggcataggaaccacggccccaggggatccctggagcccttaattccatggtccagcccctagggaccagcccaccctgcacttccaggactgagaccaaaagatgccgctcactgagtgacacctgctcctctcccttgcagtgtggggaggctgggcttgcagccagcagatgcgcttgagccgactctgcctctcaccagtgctgagactatgtgagtcgcttagccttgctgagccttgtctggcatttgaatcagtggttggtaagaggagccaatgagaacatgggcataatgccaagtgctgaccccaggacactgcccgtcaccctccctatacccctggatccgaaggccagagatgcctcctcctatagtgtccagtcatacttattgcagtcaggaggtcaaagtgagttacagagggaagggaccttggatgatgcctaggccagtgcccctctcatccaggtgagtaaaatgattgtccaaatcacagggagagcatggattcctgagggaagaggctgtgggtgggaaccaggtccaccctgtccccaaggcttgcatcttggcgccaatggccatggtcacggcacaaccagctgaagaacccccagaaacagtccctttgttctgtgtggcctcctgagccttggcaaggatctcactcattcccagaaaggacggccacttgcaggaagactattattaaggccagggctgaggccggccatggagaggtccgagccagggaggcctcacaggagcctttcatgagtctccagtggacggaggtgctggaggagccagcactgcagacgttgctctcgaggtggccagtctcggggcctgcagtggcccacagaacaggcccctgagtcctgctctaagcttctcccagaggccagggagcaggctcatagccccagccttggcatgcagtgtctccagctctgctcaagagctcctccccaccgcatctctgtcccacagagcatcccatccctctcgggctgggccggctgtactcggaagtgagcacagagggcaacccaggcaggtcagcaggggccagggcatcctatggagggactgagggctggccacgctgttgtgggggcctgggaggcacctggggagtctgtttggagctgcatgtgcacagtaggcaccctgttctcatgggtgatggtggcctgtgggtggacaacacaggttacaggggctgcctctgctggtaagcactgctggctttagtgtgcgtcccttcaatgccccagaatgaccctcgggagccagggggtcctgcttgccaggcagcagcaggcctcagagtgggcctctgtgggacggtgagcaaaatgctcatcacagtcacgcacgtgtatgtacatgcgtatggtgacataccactacacatctgtgcccatctcgatggcctcagctgcagcggctctgctgggggatggccaatactcccctcccaaaccagaaagtacaactgtgggtttgggatacgaagccctgccctgtggctaactctctgctctcatctttcccacgctcagttctttgccagagctttgccgtttaagtcatgggaccagggaagggagggagaggtattttagaatgtagcaagctaggggggtgagtgcctggctgtttaattgatcagaaagctggggctacccaacaaacatatttcacaagggcccccaggactccgaagctgtggtttgcagccagatggtttgggttcggacagtggtgttgccttttccttgctgttaccttgaacaagtcacttcatgtctcttggccttagctgttccatccatgaaatgggtcgatgacagctcccgcctcacgggttaagcaaggattaagtgacgttgtgcacgcacactgcccatcacagtgcccggtccacagactcactcaacaagagtcaggcttcttcccaactgggggctcagagccccaagtgtggggagtggaggaccccacacatctcctcctccagaggagtccccgtcacacacacagagaaagcccaagaggcaaggaagacacatgactttcacctggctgggctgcggccaagggtgtgggtggcacacatggacctccccctgatcagcaacagtgccttcccaggctgcggttgacaggcagagacgcaggccaggggcaagggagggagtgcagccagccctggcggcggggctgactctcctgtcctcggcctctccatgcacctcaaggccaggcttggatgagggcctgggggatgccgggccatgtggaggggacctttcagctttggaacaaaatgtctgaggaatgacaagggccctccttgtccatcgagggttgggggaggggagctgtcgcaaagcccagtctctgcctctgggaacctgcaaactcacacacagagagaaacaggcggcacgacctccccagcaggagcagaatggcaaggtcccagtccaaggtccccgagagggcggcatgtgtgtcccaaggcgggatgggtggcttaagcctgttcatgaaggtctgcctcaagcaggaagcccaggaggttagcttcagacagtcagagcagcagaggtggtttcccggatgggaggaggaggaggatctcaggcaccgcacggcttctgaggcccctttacactgctaccgggataatggtctcaccagccccctcagaaaacggggatatggcaaaagaagaacaaaacaaggctgctgccaatatcaccgctattaaactcagctctgaaatttcccgtcaatgcaataaaacccaaagcagaaaacagagtggagctattagaaagaaagagactacttcaacatccagattagaaagaaagaaggaaaggaaggaaggaaggaaggaaggaaggaaggaaggaaggaaggaagggagggagggagggaagggagggagggagagaaagaaagagagagagaaagaaagaaagagaagaaagaaagagtgactacactttttttctgtttgttttgttttgttttgttgttgttgttgttgttgttgttttgagacggagtctcactctgtcgcccaggctggagtgcagtggtgctatctcagctcactgcaacctccgcctcccaggttcaagcgattctcttgcctcagcctccagagtagccgagactacaggcgtgtgccaccatgcccagctaattttttgtatttttagtagagacggtggtttcattgtgttagccaagatggtctcgatctcctgacctcgtgatccgccagcctcggcctcccaaagtgctgggattacagatgtgagccaccacgctgggccgagagactacgttttcattattttctaggatatgatcatctacccaggaaactcaaaagaatcaaccgaaacacaactagaattacgaagagacgtaagtggacactagcgggacaaaagataactatcccattcattggaaggccatgcaaacaaaaatttagaaaaaaaagaaaattaagataactaccccaatatccactgctttcccgagtactggagaacctccaatcataatgacaaaatataaaacatataaggattgcgttttaaaagaaacatccatgagacatataaagaagtacagaccttggccgggcacagtggctcatgcctgtaatcccagcactttgggaagctgaggtaggcggatcacttgaggtcaggagttcgagaccagcctggccaacatggtgaaaccccatctctactaaaaatacaagaattagccgggcatggtggcgggtgcctgtagtcccagctactcgggaggctgaggcagaacgatggcttgatcccaggaggttgaggctgcagtgaaccgagattgcgccactacgctctagccaaggtgacagagcatgaccttgtctcaaaaacaaaaacaaaaacaaaaagagagagaaagagaaggggaaaggcaccccactacgagcttccaatgagttaagtgccaaggatgaatgagtgtgagtgtggcccccaagtcatccagacggtggcctgggagaggacagacagcccagcccaggccaagcccgggctcaggagcactcactgcctcatatgaagaagcaatgccacctcatgggggtgccgggaaaactggccgactctggagaaaagtgaaggccgaacatcatcctacccatatcccatttggcagaagttaaagattgaaacacaaaaccttaaagaactgaaaataatatgtatgaagaactttctaagcacacaagaaatgaatctctgggtaaagtgaatatactttgctacatatgacaaaaagaatcctcctggacagcatcaataagaccaaaatgcagaaaacgaggaaaagggctttactgcggagcccgcgctattcacagttccacgtgctgggagccgcttggcagggctgctttgcttatctgtccccagagatagaagccctggccggcatccttgctctggagactgggatggtggcttgaggccctgggacctggccgccccacctggccctgctgtggtgtgtgggactggcatgtgacaagtcccatcagacccactgtcacttcagtcaagagaccagggttccttccagggcggccgggtcctgcgagagccagagcacaggtcaaaacaccaggaacccaggaagcaccaatcctttccccatgagtgtgagagcggggatttccacagaacaccgcggcactggctggggacttccaaacgccgctggtaactgaacaaccagatcctcacagcctcccacccctatctcctgccccaaagccagcgttccagaagtgtcgggggtgagaagatgtcgggaaaggagaggcttctctggccaccacgcacaagaaagacgccttcttgccagtgcagctggtgggactagactttctttgttggagacacagagaacatctgtcaggacagccaacggctctacattacaaagcctcgccgagaaaatgaagcctttgtccccacttatcagagggcctcaagttcatcagttctgttttctagacacctctaattaaagctggcaaactgtttcctagaagaataacaatagcctgtactttggcagaaaatggaatccctggcagcttagagaggcttccaaagtacagaactgtggctgatttcctgcgaattggccatgttacagaaaaatccacgttcctgctcagatagtctcacgggtggaaatgaaataagaagagggtgtacaaaccagaactggggagccaggctgtctcctcgccttgttccaagccttaggcgccaaggctgtcgggaatactacttcactcacggtgccactccttagtgagggaaaattggcctcacttggcagatgctgattgaaccctactctatgcatggctttgtggctcctaagatctgcataaaagcaacaaggatcttctaaactttcattttaatcattaatgtatttccaaaaagcagcgcatatatttatttttttcttctaaattaggtcccgacatagaggctctacataaaaaaaaagaatgtattaaataagaacatttttttgtggaacgcattggtggggcttttattcaaaagaaattatgggccaggcgcggtggcttacacccgtaatcccagcactttgggagggcgaggtgggcggatcacgaagtcaggagttcaagaccagcctggccaacatggtgaaaccccgtctctactaaaaatgagaaaattagccaggcgtggtggtgtgcacctgtaatcccatctactcgggaggctgaggcaggagaatcacttgaacctgggaggtggaggttgcagtgagccaagatcgtgccactgcactctagactgggcaagagagtaagactctgtctcaaaaaaaaaagaaaagaaaagaaaagaaagaaattatgaactactgacactcaatttgtctaccatataaaataatgtaggtcctgttatggttcagaagtacaacagaataccatatggctagagggagacgagacctgtctacatgaactgggggggaagggcatccacattcgcagaggtggcaagttgcaggatacaaggtagaatttttttgttttttatttttttatttttgagacagagtctccctcttctgtccccgctggagtgcagtggtgcaatcatagctcattgcagccttgaggctcccaggctcaagtgattcccccacctcagcctcccctgcacctgggaccacagacgcacaccactacacctggctaatcttttgtatttttcgcagagatggggtctcactatgtagcccaggctggtcttgaactcctgggctcaagcacttctcccacttcagcctcccaaagcgctgggattacaggtgtgagccaccacagctggcctaaaatttttgtttgtaaagaaacagatatatgcatgtttatacacatataaaaatatctagaagactgtatagcatcttgttaacagtggttaccctcaagggcataaaatttggggcaaaggggaggtttgagagactcactttttttttcttttttgagacatagctttgctctgttacccaggctggagtgcagtggtgtgatcatagctcactgtagcctcaacctcctgggctcagctcaagggatccacccacctcagcctccccaataactgagactaggcacgtgctaccatgcctggctaactaaaaaaatatgtatttttttagagacagggtcttgctatattgcccaggctgagactcgtgttttaattctggatatttctgtactgtttagaagtttataccaagtgtgttctatatttgtagtaataaaatgaactaatatgaaaataaaatggtatagtaaatggaaggcaatggcctagcagtccaaaggtctggggcctcaccctagactggccactaaattacgtgactctctcggctgggcacgttggctcatgcctgtaataccagcactttgggaagccgaggcaggcagatcatgaggtcaggagtttgagaccagcctggccatggtgaaaccctgtctctactaaaaatacaaaaattagttggcatggtggcacatgcctgtaatcccagctacgtgggaggcggaggcaggagaattgcttgaacccaggaggcggaggttgcagtgagccaagattgtgccactgcactccagctctgggcaacagagcaagactccgtctcagaaaaaaaactaaataaattatgtgaccctgaacgtgttccatcctctcgctgaccttcaatttcttatccactggtgaagcagattggaccaagccacgttgaggctcctcccagtgtacaggatgatgattctccaaataaggttttctcaacatgagctagtcggttggcgaccaagcttgagcccctgaaatcttgccttcctgctgaactggaacaagatttccctctaccctgggaaaaaacaagccagaaaatgcccttcctggcctaagggtaggagggagacatctaccattctaatgaggagctgtgtctgtatttacaggtgaggccattccacatacattccagccagaacaattcagggtacctaggagaggtatctgtgtagcaggagatgtggacctgcctggctgaatgtcagctctctaggcttccttccctgctccctgctcaggccaaacacttcctaggtcaacaccaaccccttagtcgtacctcgatggctgccattcgcccaggccaaacacttcctaggtcaacaccatctccttagttgtacctcgatggtctgccattcgcccaggacaaacacttcctaggtcaacaccatcctcttagtcgtacctcgatgggctgccattcgcccagaacaaacacgtgcagcatgttcacatcgggatccttgtggaagatgttaggcttggcgtggtgctggaagtggcgatgattccaccagttggcagaggcaccctgtggggagagaggggtggggatgagccatgcaagccaccagggaaccgagctcgcttgtaacaggcccttcttaggagcagttcccggaaccttcaaccctcggggatagcacttcaggcccccacaaggccagaatccagccctgccatgactgagctcagagcatgcgccagccccagatggagtgaagtcactttatctctctaggcttcagtttccctgatcataagacgatggtggcagatgaggcgtgctgctgagggaccacacggtgagcgctccagcaggtgtggcagccagtctctgcctctccgtcaccaggtgtggaaccagagctgtgcaaggtaaagccgaggtttcagggacagtgagaagtggtccctactatgtggcccagaaatctccctcctgagcgtatatccaagagaaatgaaaacatgtccacacaccaactcatagagcagtgttcacagcagcattcttcaaaagaaccagaagagcaaaagcaacacaaatgttcatcaacagatgagtgggtgaatgaaatgcagattatccacacagtggaatatcatttggctgtgccgtaaaacagaacgaatcactgacccttgctacaacacggatgagcctggagaacatgctaagggaaggaaggagccacaaaagaccacatatcacatgattccaccgacatgaaacgcccagaatagggaaatctatagagacagaaagctgagcagttgtgtagggctaggattggggtaggggagggagtgagggggttgggatgtgatggctaagaaacgtggggtttcttttgagcatcatgaagatgctctaaaatcgactatgatgatggttgcataaatctgtgaatataccaaaagtcattgatttgtctactttaaatgggaaaactggctgggcgtggtggctcacacctgtaattccagcactttgggagacagaagcgggtggatcacttgaggtcaggagtttgagaccagcctgggcaacatggtgaaaccccgcctctactaaaaatacaaaaattagccgggcgtggttgtgggcgcctgtaatcccagctactcgggaggctgaggcaggaaaatcacttgaacccgggaggcagagatcacaccactgcactccagcctgggagacagagcaagactctgtttaaaaaaaaaaaaaagtgagaactgtatctcaataaacgatttggagagcgcagttgtgctgctatgctgagggtgggtcctgagattcgtgtcacaccaggaaggctggagggagggctcaacaaacaactgctaacatgaacaagaagaactttcctgtttctaacactcaaataggatcccatgagacaagacacataacatggatatttcttttgaggccacaggtgtccgtctcctcagctcagagttatggccctcgacagttgcccagcgacagatgaaagaaaacacactttcctgaccctttggcatcacgactatcctggtgaactgttgccggatcaatgctttggctaagggtttgcaaaaaatgcctatttgctaaacaaacattttacttgggagatgcttttggcacacacagtctatggacactaatagccatgggtgggaacagcaacggacagctgtggcctttgcagtaacctcagggccctggaaactggcaggcctcaaaacccatgagagagagagagagagagaaaaaaaaaaaaaaagtcagagagtgaaagctcagaggcttcactttgggaggctgaagcgtgtggatcacttgaggtcaggcgttcaaggccagcctggccaacacggagaaaccccgtctctactaaaactacaaaaattatctgggcgtggtggcgggcacctgtaatcccaactactcaggagtctgaggcaggagaatcctgtgaacccaggaggccaagatcataccaacttcactttagcctgagcaacagagcaagagtctgtctcaaaaaaaaaaaaaaaaaagaaaagaaagaaagaaagcttagaggctcgaggaatcaaatgacacatttgcgtttgttgtcaaaaggaacaaaattcctgggaagaatcaaatggaaaaatctctggcacaaagaaactgaggagcaaggcatgaaacaagtaagcgtgatgtttggaggataccaacccagagatgtttattgaacaaacagatggaggaaagcaagacgggctgacaacaaggaggcagtgaggtgggcagtcccggttctccctggactcgggatgagatgtaatgaaagcattttttgttcatgctacttcctctgctgtgattctcttccattttttttttttttttttttgagacagagttttgctcttgtcgcccaggctggagtgcagtggtgcaatctcagctcactgcaacctccgcctcccaggttctcctacctcagccttccgagtagctgagattataggcgcccgccaccatgcccggctaatttttatattttcagtagagatggggtttcaccatgttggccaggctggtctcaaactcctgaacccaggtgatccgcccacctccgcctcccaaagtgctgggattacaggcataacccaccgcaccgggcctctcttccattcttctttgccaggtgaagccctgcttgtccttcaagagcccctccttccgggcaccgggaagcccgccttgcccaggaacaatggccagctccgtgttcccagaatgtggtgcagatgttgcctaccctaagccagctgccgtgctctgcctgggaggtgaaccaagagacaaagcccttgtcctcacggagctgcgagggagggtctggcctcatcacaccaaacccaaactgagctggggccaggaaagctaagtgtccacgcagctggagaagttggccaggcagagtgaggggtgctttcctgacagaggcaagagcctacgggaggccctgggagaggaagggggagtgtagagtgctccagaagccagaggaaagctcctcggtataactgtgaccagcagtgctgggtggcgccatatcagagcctgaggcaaaaaaaaaaaaaaaaaaaaaaaaaaaaaagtgcacttctggctttaatggaaacaaactcatcgataacattttcaaagcctactttttgcctcatttcattttctttcttttttcttttttcttttttttttttgagacggagtcttcctctgtcgcccaggctggagggcagtgatgcagtctcggctcactgcaacctctacctcccgggttcaagtgattctcctgtctcagcctcccgagcagctgggactgcaggcgtgtgccaccacgcccggctaattttttgtatttttagtggagatggggtttcaccgtgttagccaggatggtctcgatcttctgaccttgtgatctgccctcctcaacctcccaaagtgctgggattacaggcgtgagccaccgcgcctggcctcatttcattttcaatggaaagaattgctgagtttgatggtttctgtcaaccaagcgattagcttaaataatttttatgtttattttttatttttgagatggagcctcactctgtcacccaggctggagggctgtggcacgatctcggctcactgcaacctccacctccctggttcaagtgattctcctgtcttagcctcccgagcaccctcgcctggctaatttttgtttttttagtagagacagggtttcaccatgttggccaggctggtcttgaactcctgaccttaagtgatctacctgcgtcaccctcccaaagtgctgggattacaggcatgagccaccacacccggccaagccacctcgcccggtcttaactaatttctaattacattcaactgaagcaaaagtataataagttctgttttggtataaataaagcatttacacttagaatgttatgacttttaatacatcaacttcttcattgttaaatatttttttaactactttaatcctctggaaaaaaaatcaaccattaaaaaatgacacacgaacatgtttagagggttgcatgtttttccatttccctcagttcatcctgatctttatttaaaattttgatattttgttcattgtggatttttttgcattaattttgatttttttaaaaacatattgcaggccgggcgtggtggctcatgcctgtaatctcagcactttgggaggccaaggcaggtggatcaccttaggtcaggagttcaagaccagcctggacaacatggagaaaccccatctctactaaaaatacaaaaaaattagctgggcatagtggcgcacacctgtaatcccagctactcgggaggctgaggcaggagaatcgcttgaacccgggagacggaggtttcagtgagttgagatcacgccattgcactccagcctgggcgacaagagtgaaactccatctcaaaaaacaaaacaaaaccacattgcattaaaacatcatttatcttgataactgaatttgtctggtgtccccttagaatttgtctggtgtccccttagattttataccctaagcgagtgccttacttgtttcaccctaatcccagccctggtggcctgagatgaggctgcagaaagtctggtgatgtccatttccagatgcagcgcccagatggcactgggcctttcagcttgcatttatttatttagagacagtgtctcactctgtcacccatgctggaatgtagtggcaccatcacagctcaccgcagccttcaaatcccaggctcaagccatcctccggcctcagcctccccagtagctgggactacaagcatgcaccaccatccccggctaattcttttatttttagtagagacagggtcttgctatgtggcccaggctggtctcaaactcttggcttcaagcaatcctcctgccttgacctcccaaagcgctgaggttataggcgtgagccactgtgcctggctgaagtttgcatttcatcctaagtacagtgctgaactacgaaagagttttaacctcagaatcgtctttgtaaaagatcacactttggaagaaatgtccactgggcatgacacgggctgaaggcaaacaggtcaggatgtgaagaactcccattaaatcccattagcagtgcagccaacaggaagaagggggtcccagcctctcacagcacctggtaacctactcacaggtctttccagcctgtgctaagacatctgagttggcgaggcccttgaggacctccctgtagccagtcccctttttcccagtgatgggaagagacacagacctacaagatttgtccccatggctgtgcacctgccgagtgctagagccaatttcaggcaagcttgacctccgtgctctggggcacccctgagtgagccacatgtccatgtccttggcctgtctctgtgacacagcaccaaggacacagccagtgggggctggtgggccatgagtggagcccacatccccaagcccaaggaccctgtttgctgtcatccacgttctacatggagaccagtcctctgtcctggccccgtctcccgcctgacgcaacagccgtgctctggggcccctcaaagactgagggcaattggacaggaacaatcccccctgcccggcccctgcccagaatctggaagcaggacacagcccatctttgttaagtgtgtgggggctaacatgggtcaggagttaaatgttactttgccatactgaggagggtttgatccaacagagaagagtataaaatgaaacaaagcactccactatgtgcaccctctccctttgcccctgagattctggacagagaccaggttctcaggccgcttcaggctcagggccaggcaagctgctcgctgcgaaactggtgaccagctcaggggtggttggccaccagtgagatctgcagccggcaagccaagggccccgttgcggtctgggtggaagaggggataagctacaccccacatgtagctcgtcccttgccagggtgtggagggatggattctttaggacccagcttttctcaggaagcaggtactgttgggtcaggctgggatggggatagtctatttcagagagcaagttggcaaagactcattttcaaaactgaggagataacgcctgtcagatcagaacaaggcagttggcaattccagcttgtctttctacaaacatgctgagactctgtggtctgcttccttatctagggggaggtgagagtggaacttccttaactcctgcacttctaatgacttttgtcctttgggccagctgatcattccgtagtttggtgtcccctatctgaggccttataggatgacttttactttttgtaccccgcttatttccaaagagtatttgaagtggcttgagataaaagactcatatataacggaaggctaaaataaagataaaagcataaatgccagatgaggaaggagagaatgggggcaccaaaaacacagactaaagatagttgctgtttcaaatgctgctttgtacctcttggcttctgaggggaagagaggagcacaatgtgtttctttttcttttttttttttgagagatgggggggggtctcactatgttgcccaggctggtctcgaactcctgggctcaagcaattctcctgcctcagcctcccaggtggctgggattacaggtgcatgccaccacacccagcacaacgtattaaagagctcacatccccagtgaaaggaagcataccaactcatcaaaaaagatgctacaggccggatgcggtggctcacacctgtaatcccagcactttgggaggccaaggcaggtagatcacaaggtcagaagtttgataccggcctgaccaacatagcaaaaccccatctctactaaaaatacaaaaattagtcaggcatggtggcgagtgcctgtaatcccagctactcgggaggctgaggcaggagaattgcttgaacccggaggtggaggttgcagtgacccaagatcacaccattgcttccagcttgggtgacaagagcaggactctgtctcaaaaaaaaaaaaaaatactgctactttactgtccccaaacaaaaacagatttgttagatgagtccttagctaaggaacatcaaaaaatacaatccgctgagccaaaagacaagaaaggtgtgtgcctgtcttcataatgagtagtacaccatggctttgtggttcggacctgatccagagacagggctcaggaagtcagcagaatggagagtcaccatggccctcagcataggcacacctgccttgtcaccctgtagcctcagagcactgagcagagaggaatcctggtccctctgtctcaactgctgtccaacaggacagatgcccagggctgctgacacttacctttaagtggccaatgacgaatttgtggacaaggtggttccacttgggttttctgtagacagacaggtggccataatcatgttgcagccatccagcttgggcctggggagagagggtcacacgtgctgtcacagcctcagcaaacaggcaccaggcctctgtcagctaggggaagtgagggtgtcacgcctcacctgagaggtagcaaggacaaaggccgtgatgagggtaggaatccagccattgccaaagtaaaagacagtgaaccatgcaatgctctccagggcgatgatgtgggccaggaggaggaggaagaacacgtggttggtcttgaacaggttcatgtcctcagccgtcttcctcagggcccggaagtcctcagtgatctttgactgttgaccaagagcacagggaaaggagtcagccaccagccactctggagggaacatatgtctcgagctgccatttcaacagccaatgcacaacccagagaagctgtggcaagagggggccaagccacaagcctcgaccctccaggagtccctacaatagctgctgttaccacatgccccacacagccctggggcctgtatatttgtcacagctaggtaagagtgacagagaaaggctttgactcaaaagcttgcattttatacaccctgtgttcatagctctattcacatcaggaaaaaggtagaaacaacacaaagatctcgtgatggatgaatggatcagcaacacgtggtctatccatgcaatggaatattactcagccttgaaaagggaggaaattctgacacatgctacaatgtgagtgaactttgaagacatcatgctaagggaaacaggccagtcaccaaaggacaaatattgtatgattccatatacaggaggtccttggagaggccaaattcagagacagaaagtagaatggtgcctgccaggggctgagaggtgggagaatgaggagtgagtgcttaatggatgtggaatttcaatttggggaagatgagaactggatggtggtgatggttacataacaatgtaaatgtgcttatttgatgccactgaactgtacacgtcaaatgaccaaaatggttgaccacacttttttaaaaaagaaaactttaatcccagcactttgggtggccgaggcaggcagatcacctgaggtcaggagttcgagaccagcctggccaacatagtgaaactccatctctactaaaaatacaaaaattagccaggcatgatgatgggcacctgtaatcccagctacatgggaggctgaggcaggagaactgcttgaacctggaggcggaggttgcagtgagccgagatggtgtcactgcactccagcctgggtaacaagagcaaaactccatctcaaaaaaaaaaagaaagaaagaaaagaaaagaaaaataaaacttgcattttccaccaccaaacagagcaccacttgctctgcgcacactgttgggtcttgaggggttgagttgggggcgacacaaactagcgcaggagggcgagctgaggcaggcaggagggggctgtgagtcccgggcacatggagccagggaggcaaagcggagtcaaggagggccctgggaacacaatggcattgcgaggaagaaggaacttgggacaagaggcaggggcagggccggacggggaggagagtggatacaaggagaggagcggtacccacagggcatgaccaaggtgctatgaagggtggttctggtggtgcctggtgggagcttggatgctaaatggtgcaggatctgcagcagaaagggagagcagtggagagagccaaggagcaaggccatggacaagggagctacagggcaggacgagcagagctggggaagccgcaggccaggaggtgctggaggtgagagtgggagatggacccacttgcgaaggaggcaggaggggacaagcatgggctggcatgggtacagggcaggtgatctcatgtgccatggagggcaaggtgagaggaggggcattggcctttgaaggacctgcagggtggcccgcagctcatcaggaaagccagaggcaatgggggtggtgggggactggccaagagtccaggccgggagagaccctggtcctgccctggctctgctaaacagaggggtctggcccaggctggcaacaagaggaggaagagcttgctgaggccagggtgggacttccatgaccaccctggtcacagcctgtgggtaccactcctctccttgtaacaactctcctccccgtcctgccctgcccctgcctcctgtcccaactttcttctataaacggctccgccatttacatggagacttcattgttgaacaaaacaacagcccatgagacctcaggggttgctattttcacacatggctgtcctggaagcccagcacccaggggggcgtctgacctgcagacaatgaacagatgaccagggaatggtcattctttctcaaagaggtgccccggaccacacaccccaaagccactcttgtcatcaaatgacatttttcggtgtttctgtcctgtctttcccctagattgtcatctggcaccttcctggaaagggatggaggagaaggaaaatgaaactggccaggagagaggagacgccactagttgttgtcaaaccccggctcccagggaggctctgaggccctccctgaacacaggtgaaccacagtggctcctccaggacaaaagcacccctgcctcagccccagttactggtcatggggcaaggggagcctctctcagactcccagccacccccagcctcgtctccacccccacccaggttgcaagccagacttacgttcttgccgtggtcctggctgggctcctccggggccagttcaccaatcagcaggggtttcaagaacttgcccacgaattccaggtcagggtggaaggcgcggaaggcatcctggagagcagagggcagtgatgaggctaagacctgaactctgtctgctcttgggccccaaggaggacagtgctcaccagcaacagctccatgtgtgcacccagacaccaaacggggtctcctgtgatctggccccaaatgccgtctccagcatttttccaggacagagccctcagtgcccaacgccaatggcaacagccacctgggcttctgtgctggtgcaggcatgctacactccccaggggtttgtgaatagatgcataggctgcctttgggcaggtcgggaaatggtgaccctccaggaaggcgcaccaggcagacacggggctcagggaggacttgagcctcgactgctcgtgagctgagtgccttgcatggtgcacaaaccacaccacccaccatctcttactagttcctcacctacatgtccagggtggtcaatgaaaaggacaagaccgaatactaccttggcactggaaatgtgctgtgatgaagtaaataaaaaaataaacacagaattatgtaaaaagcgttcctgaaaaaaagcctaggaggatctaggctattattgcacatgttaaggtagctggattatgccttgctttattttcattactttccaaactctaacactgctataatgatacacattttaatctttttttcccaattataaagtaaaaacgtgctgagttttggccaagttagaaaaggcacagcagaataaagaggaaaataaatatcacccagaaagtggtcattattgctaatattttagcatttttccttccagcttttttctatacatattatgcatattacatgaattatctcataaaaaatctagtatttctattagagatgagccagcaccaggctcccctgaggggatgcaatagaatgtcccagtggtgaacactgtgtaatctgcatcaaatcaagcttccagacattggtaggattggcaaaccagtcaaactccaccatgagaaacaatcagaaaaatcaatatagctggggaaaaacatacaagtttgtggaaaaaacaaaagtacggaagcatggtctagattaaaagagactaaaatgatataaaaactgcaactcttgactggtcgcaggggctcatgcctgtaatcccagcactttgggaggcagaggcaggaggatcacttgaggccaggagttcaagaccagcctgagtaacatagcaagacccctgtctctactaagaataaacaaaattagccaggcatggtggcctgcaccaataactccagttactcgggaggctgaggcaggaagatacaataagcaatgatggtgccactgcactccagcctgggcaagagagtgagaccctgtctcaaaaaacaaacaggccgggcacagtggctcatgcctgtaatcccagcactttgggaagccgaggcagggcgatcacctgaagttaggagtttgagatcggcctgggcaacatggtgaaatcccacctctactgaaaatacaaaaattagccaggtgtagcggcgcacgcctgtaatcccagctgctcaggaggctgaggcatgagaatcctttgaaaccaggaggtggaggttgcagtgagccaagattgcaccactgcactccagcctgggcgacagagtgagactttgactcaaaaaacaaacaaacaaacaaacaaaacaacatcctgcaattctttaatgtgacaggctctcacttgaaggaaaaaagaagttataccaggtttttcgggagttgaatgagaaaaaatgaatatggaccagatatttgatcatatcaaggaattactattaattttcttaaatgtgacaaaggtactgtgatgatgttagagcatctcttccttttttctccggaaatgttgaagaccttagggatgtgatcacacaatgacgcagcttattttcaaaaggcaactgcacacatataaagaggaaaaacgcaaatgtggcaaaatgttaagactagtgaatcttggttgaggatacacaggtgtttgcttgttccttcaacatttaaggatgttgggaaaatttcaaaattaaaaagaagagggggccgggtgcggtaatcccagcactttgggaggccgaggcggcggattgcctgaggccagaagtttgagatcagactggccaacatggtgaaaccccgtctctactaaaaatacaaaaaaaaaaaaaaaaattagccaggtgtggtggcacacgcccgtaatcccagctacttgggaggttgaggcagggaattgctttagccagggaggtggaaggttgcagtgagctgagatcgtgccactgcattccagcctggcgacagagcgagactccatctcaaaaaaaaaaaaaaagggtcgggggaaggtggagaaagtgctaaccactcctggaaatcttttcagccccacacgtaaggatctcccaagggtaactgccagtctcccatcatctccttactgcattgctggcatcaagtcctttgcttggtctttgttctatttgtgtctagaacagactgacaaagcaacacttcgtgcaggagaaaactgggcccacggtttcttaaaaaatgcctgtgacccactagccgagccgaaaagggatggtagcagaggatcaggtcaagagtattttcagggaaaagagacgtgctattccagggccctggggaggcagggagaagtccctggggaggcagggaggaggccctgggggcaggcagggaggagggctggggtgggggggcaggcagggaggaggcccagggtgcgggcagggaggagcccagggttgcagtggtgaccagctttgctggctctgggtggggtgatcagtccccaccagagcctcagccgcctatgcaaaatgagcaaggccctgggagaggcccggaggagctgccaaagtcagggcccagggctgggcctgaaaaagccccttcattggtcctcctcacatcacaccacggcctttgagaaatgaacaggaagtccctggtaaggcagtttcctgagaagcagctgcagtggctgataactaatggattcctcttgtctcattgaaaggcaagactcaatggcttgcaaatagactcatctccactcctgctgcctccccaacacccgaaccctgcagtcgaggttccaactccaagggagcagacagatgacgagccctgccttgaccttggttgctgctcagccatttccagagggctctcgggcagcctcacctccctgagcccaggggtaatgggcatgcgccaggcagggagccaggagtgttgctcatgttactcccttaggcctcaagccccaacttctgaggtgaagatgcaggagctcaggaagcaaagtcctgggctccaggtggcagagccaggatcaaatccaggtccatctgcctctaaggactcttttctcacgtgccacacgcttcctgccgttttagaaaaccgagcagtctgttggatcagctccttgcccatggtcagtgtggcagctttccgagcaggcctggtgcggaccgcccttgaacataccacgctcctttccacaccagggctgcctccattcgggactcagcctcaacatcacctccaagaggcttttcccaacatcacatccaaaagagctctcccagccctgggccttccctgggtcattgccctgttagatcttcatagcagtcatcaaggttcgtcatcagactgcgtgacgtacccacttgtttatggcctgcgtcccccgctggagcataaaccccagttgggaaggcctgcacctgtcttgttcgctgcaataaacacagtgcctgtaacggggcctaataagatggctcacgagggaataaatggacccaggaccccacagctgcacacactctgatctcatactttcccactgtgcagtcatgaccagacacttgtcctcttccgcgtttcacacaacttggcttctgcctctggaacaccaaaagccttctccggcatccccacgctggtggttgctacagctgccacctgctgaggtgacgcaggcgagccacggggccatgggagtggcttgcatacatcagccaggcatctttaccaaacttcgtgaggcaggtccttttttagagataagaaatcaggcgtaggttggcagagccacctgcccactatcacactcgggaatgagctgagtagagtttgagtcacatgtggctaccttgagcattgcccgctgttcatacaaaggcttccctcaacatgagtgtcctcctccctgagagttgattatattttgtgtctctcccttcacattgccataaatgtgtctcaaacgctggcagaaggtttccagcacctgccgggttacagaaatatctggcaggtataaggcagaccaggattcaaggcaagggagggccaacccaaactttgtctttggaccaagaattggaaccaggctctatcctagtgtaacgggagagaagccagagactttccaggaagaggacccgggacatggggaagagaaaggattggtaaacaggtggagaaagcagagatgcacccgcctcggcagggcaggtgtgtgaggtggggaggtcagaacaccctgattctgaagcgcttgtcacacttcgctctttgccagttcctgcttctgccatcacccaggtctgatgccagtcaacttctccacagggacattttccctgcccctgccccactctgggtacaactcacagttgctcgccatccactgagcacctggtgccaggatttgtttatggccgtgcccatgtcctctggggagcaaggctaatctctgatcgaatgctgcacaactgggcactttgcctaggatgtgggaagtgcagcacgggcaagcacagggcacacagtgcagtaggtggcagccctgcggaccagaactttatggaacaagtgatctaagagtgtggagatgcacaggagggatcctcgcattctccagtggaaatgaagagcaagacagggatgctgacttcctttctgcagcagagagaggcaggcagggcaggaagcccctatgccatgtcccctccaaggaaagaagcaatggaggctggtggggcagtgctctgtggccaaagagccccgcagtgagagcctcccccataacacagggtccatgcactaccctgagggcagaaaggcagggctgcacaggagacaggcccctacaaaggcaacctgggcatgaagaaattgatgccattctccactttcatctcagaactgcttcctggggatgctgaggctacagccacagaaattggacagctcccacccagatctcagctggggagatggagctgccctccaggcctgggaattcataaagctggggctggaacccaggtctcctgcctctaaatactacaaccctcctgccccgtgcaaaggaggccagagttccactttcgatctgttgcgttttcacaagaataacataggagcaggttgaaaggtggaacaaacctctggtctcttctcaccttcccttgattctaagaggtcaccaatgcagaccgggcaggaacagttgctgagacaagggctaggggtagggggctgatgtctagaggcagagggtccagatccaagccccagcttgagagagagcagggggagcacatcccacagcttcaggtctctgtctgtgaataattcatctctgtgtctgggcccagctcagagccatggagacactcaattaatgtttgatgaattgtcgctgaagatgaacagttctgcagtggtgggactgctgtgaaaagagcagacacgctcttagggcgcgggtgagggttccttttgcccacagcaaggaaaaggcgagagaagcaccgcagtaccaaagggaagagatcagaggtagcaacaggaagggaaggaagctgggaggggaggacttgaggtcagattctgagtttaagtctgagcactgccacttaagccaggtttgatacctcagagcagtgagagatgcctacggggctgatccgagtatgaaatgaagtgatacatatgaatgtgttttgtaagttgcaaaaatcaagcaacttgcattattataggcaaggtcagggtttagcttctgtggaaggaccacgtaacagttgccccatccttctagggagatggatcttgactacctggatcttttgctcttcaaaaaaaagaaaatgccctattgaggcccctgattgtcccgagaatggcttccctgacttcgaggattgtcccaagaatggctaccttgacttccgacctgtttccagccttgtgttaggaatgactgcactgtgatgggctcagaacattgcctgggaatgttgcagggaatccaaactgtcttctgatcagtccctccccagactgtgcctggtccataaattgtcactccccatgctctgggggacaaaccatcaccccaaggggcaaagccacttgctcaacagcctaggcaagggtctctggatttcagtagcctgttcctgcttctctctttaggtcccctttccacatgccccacccaccccacgctgctcaaggcctttttccaacctggtcctggacagtttaaaaaaacaaaacaaaacaaagagaacccagctgctcactccatcatcaccatcattcaaatctgtatccccagttcgtgtatttcatgccccaaaagtcttattttagaagacaggaagctctggggacagggattgcttttacgtgttgctacaccaaataaagctagcatagatttaaattttttcttcaaattcctctttgcatactttccattctagctgtttcataatacttgttcttattcccgtttgcctgataacaccccattgcattcatctagtggttacagttgctgggtgctttgccacaaatcagtctcattgaaacaggtacaggtgtaccttatagatgaggagatggggctcagtcaagtgacaacacttagtggatgagcccagtaatgacatctttcttcaattctagatctgtttgcagccccggttggctcccaccctagcttatgaaagtaacaaagcaaccaacatccaagataccagatttatagtccatgaaagttatacagaaagcgctggagcaggaccagaaatgacgagactattacatttttatgagacagagaaaaggtcagggaagagtaggtcattctagtcctctgttaggagagatgtgagcactgatttttggagggaactcagtgttaaggtcaggtaagcactgagaacatccagaacaaggaagaaataaatcaatctgatatggtaattaaaccagaaaggtcaaggcaattgccagactaagcgttcacataagaaaatatgtttaacaatgtggaataatcagaccaaattcatcgtatttgacttttccttctggaaactttttggtgagggcctggacaggacaggaaccttctacaatttacctatgaaatcagaaacagaccagcccaagtccagcaacatatagtggaaagatcccagccaggatccagaaggtcctttacttaggagttacattaacccaacctcctcactgggccgcgtaaaggtccaggtgagatagcactgaaggtatgtgaaacatacccacctaagttctaaatagcatcacaaacccactgggcttaagcaatgtccacaagcaagtaaaacaggatgggactgaaagctgtagggaatttcagtatcgctgaccttcccaatcttagataagccctggccctgctggcccacaccacctgtccattgtccagcttgggttatggtggcctggtctggccttcccctaggcctgtctccatgagatgcaagaggtggggaagttaagggtcgggcctacacagcttagagagcaaaagcccaccaacagttgggcatcctagacctccaggtggaatgatctacgtcaagttcatccctcctttctgcctctctcctattcactttccccaatttctgtatcccatcagaccttttttctctgcatccaattcactaccaccaccaaaagccgccctttcttccctccttgcctctgttcttttccttctggcccattcgaatccatgggataccagctgcatccttaaataaatgccaggatttcagactggggtccccggtgcgggtagctggtgcggggtaatcactgagccacgcatttggtgggggtaaggtgggcagcaatggctccagagaggcccacaacctttaggagtgcaagatgagggaagggtgttcttggcaggatttaaaaagagagagccattgagttgaacgcccgagagtaacctcgagtgcagacggacctgttgccaagccagtctagtgctgctaaatccaccggctcaaggcctcactcgacctgggctttgcaaaccccaggccgttctccttccaccaatcccggacgccggtccccaagaaggccggctcgagcttggggtgagtctagataatccctggagcgtgggaacccgagctgctgggcggtttttcccaggtggccattgaggaacttcttagacaagagtcccagcaggagcgatctccggccggggacgagctttccttctcgccacccagtctggatggagagtgcgggacaagcgcggagtcccacacctggctgcctgcgctcccgctcctttcagcggcgcgcaggggcggccatcttccccgctgggggcgccaaagccgtctggcccgagcgcccctcttggggagtccctgcctccagacaaaccccgaggaaggggaggacgcgtgggtcccggcgcgcgcggtagatgcttgccctgttctccaccgctgggactttcaccgcagcgccgcctccccgggtcccagatccggtctccaccccagtcggcccagaggaggaggaggattggggagggggtacgagtgcaatagatgcactttccttccctacaggacgtcccaagctccattcagcgccggaggtctgtttggcccacggggagccagggatcctgactccgcctgcagcagagaagggtggctggggcgcccccagacccttaccgttgcatcttctccagcgtagtgcccgatgacccgctggccccccgggtgctggatggaccatttggtgatgttgtaaaccttgcggtcaatgaccagccacctgtcggtgcgcaggttatgcttctgaatctcctcccagctgaaggtgggcaccgacacctcgcgctcggcggccccctcgccctggttccctcccttccccatgctgcctgccgactgtgacgccccgtgcactgcggcctccccgcgccggctgctcgctgcacagacggctgcctcccagccggtgtgtgcagcccgggccctcttcgctttcggcttttgtcttctcctactcctcccaccgcgccccctcccccagccttctcgcctgcgctcgggagtgtccctgccttcctggcggaggatccctggcttcccagtgcccccaagcggtccccttcctccgcccctccctcagccctcccgctatggacttttgcctccagtaaaaactccccgggagctcagggcctcgacacctcctctgcccgcccctccggctccccccgcctcgggttccacatcctcccgcgttccccgccgcccgagtttccacagcgatcagcagagcgcctgcaccaatccggtcgcgtcgccccgcctgccattggcccaggaggatctttcgaaggccagcgggctggagcggcgggtccccggctcccccgccctcccgcgtggagtcgagccctgctgcgaggcaggctacgtgtccgacctcctccctcccccactctccggccccgggcgccggaggagatcctagaggagatcccggtgggggcaacgaatgggctccgcgcgctccggggcgcgtgcgcgcacgcccggcgctctgggggtttgcacctgatgccgacacaaagccggcgcggccaccagggtgccagcaagcggccgggcgggtggaccggcgggctgcggggcactcaactccagggccggcttggctaggtgacgcccttccttggcgcgcggcagtcgagactccagtatcccacattgtccgcgccatccacattctggcgcctttctgcaacctccctagagacacaagccggccttggattagagggctttgaaccctctagtcagacaatcttagaaaagaattgcggaacctctgctctgctttcttggtctgggcgccatggctgcggtgagggggaagggaggggaaggcagaggaagggggcgatgaggaactggcgcggtccttgccctggtctcagtaagctcagtctctttgggaatcgtggaagcagacacatcattgggcagtgatgttgtgcagactccagcaaataaagactgccgtatcgaagggataggaggagggttaggtcttttaggcgtggggcaagagacaggcccctcagaccccagctggatggggcggcttagtgccgggcgtcctgggggaaatgggcctgactgcatccggagggctaacgggacacgtgggaagtaaggatgaacagagagggtggggtgcacgaggcttgggaatcactagaggagttatagggccctcagatttcaatgggatttacaggtgcctgtgtgctagcacaccctaatcattagattctcatcacaggctgagaggtaaacaggacgcatattattacatctcacttgaaaatggagagcctgagattgagagagatggtcaaacgggccctgcccaatctaaatttcacagcaatgcaggggtggtggggggatcactctgcccaactggtggggttgtacttgggggggcagatgggctccctttcctcacattcacacagtccccaacctctcccatcacatttcatgctggtgtcagccctgagcatccttcattcactccacagactgcagacataaagacagtaaggcctctctgtctttgagtgtgagcagacatcccaaacaaaagccttctgtacaaaataagaggatgaagcaagacctccagagagtatggtggccttgaggactgtcaaacgttgacggaaatggaaccaagaaaattattttctcagaaatggattaacataccatatagataactttaatgaacatttgtaaagggtgtggagctcggagcagggagtgatagctgaaaggcagaaccagggagtatctcacagaggctttgaaggttcaggccctaaaagggagcacgtatgggtggcctgtgtagggtggctgagaagcgtggaccggccagggcctggggtccccagcggctcccagcacagtaccagccagggtaggtcctgaaaaaacataaaaacatgtgttgaagacacaaatgaatgaatgaagttcaaagaatggctccaatgaggccggcggtagatggggctcaaattgagaaaagccccagcagcctcagtaaggggtaggaagggaggactttaccatggaggaggcttggacatccgtaaagcaggtgtactgtgatcagatccatggtgtagaaagataactccagaggctggggctggactgggatgtacgggagaaactggggaacagtgatgagttcaaagatgagggcagtgctcgaggagaggggaggggaggcctgaattaagagagaactttagggggctgaccccacactggacactgccatgtgcctccctgccctctaatttttttttgagatgcagtctcactctgttgcccaggctagagtgcagtggtgcgatctctactcactgcaagctccacctcccaggttcacgccattctcctgcctcagcctcccgagtagctgggactacaggcgcctgccaccacacccggctaatttttttgtatttttagtagagacggggtttcaccgtgttagccaggatggtctcgatctcctgacctcgtgatccacctgcctcggcctcccaaagggctttttctttcttttttttttttttttgagacagggtctcactctgtcgcccaggctggagtgcagtggtgcgatctcagctcactgcaacctccacctcatgggttcaaatggttctactgcctcagcctcctgagtagctgggattacaagcacccgccaccatgcccggctaatttttatatttttagtagagacagggtttcaccatgttggccaggctggtctcaaactcctgacctcaggtgatctgcccacctcagcctcccagagtgctgggattacaggcgtgagccaccctgcccagcctagaatatcctttggaggtagaatcaagaccgcattagttggaggtacaggggcaggggtgatggtagagatgaaggaataagagaaataagtctgattctagcatttgagttgagcaaatgaatagataatgggaccatttaccaagatgagggaacagagttagtacaggggtgaaaaattaaaaattctattttaacgttatgtttgaaacacctaggctgggagcagtggcttatgcctataatcccagcactttaggaggccgtggtgggtggcaccatgcccagataatttttgtatttttagtagagatggggtttcaccatgttggccatgatggtctcgatcttctgacctcgtgatctgcccacctcagcctcccaaagtgctgggattacaggcgtgagccactgcacccggccaacacctgattctctcttactgcagaagggtctcctccatgtgacaaaaaaatatggctgtatttgctaagctacgctagcagaaataattctcccccattccctgctcccaaggattaattccagtttaatgggctctgcatcagatgctaaccattgggccactgttatcagacggctgagttactctattaggtgtaggtcataagccaagcagcagacctgggctttggggaacagggtctgttcctttttgtgggaagtcacaaaccaaaagcaattacagaccgctacagtattcctttcccatacctaccatgtgatgttagacctctgtctctgaccttcagtttcctcatgataaaaaggagacagtgatttttctttctttctttctttctttctttctttctttctttctttctttctttctttctttctttctctctctctctctctctctctctctctctctctctctctctctttttttttcccccaagatggagtctcactctatcccccaggctggagtgcagtggtgcaatcttggctcactgcaacctctgcctcccgggttcaagcgattctcctgcctcagcctcccgagtagctgggattacatggcatgtgccaccacacccagctaattttgtatttttagtagagacagggtttctccatgttggtgaggttggtctcgaactcccgacctcaggtgatctgcccacctcggcctcccaaagtgctgggattacaggcataagccaccgcacccagcggagatagtgatttctaacctatctcatctattttaataacgaggctcaaaggacacaaggtatgtgaaagtgccatacatgtattttcttaactagcaatattggtgaggtcaaactttaaccaagctcactagataatgatttattaatatgtggtgaaagtcataactatttttaaaaaatgaataattttcaacaacaaaaatggcatcaacttagtaagtgcatcaaatttagatgccttaaatgacaggctggggaccctatctaagaaactgggttaggccaggcgtggtggctcacacctgtaatcccaacactttgggaggccaaggtgggaggatcacttgagcccaggagtttgagaccagcctgggcaacacagtgagaccctgtctgtacaaaaatataaaaaattagttggatgtggtggtgcatgcctatagtcccagctactcgggaggctgaggtgggaggaatgcttgaaccgcagaggtggagacttcagtgatccatgatcgtgccactgcactccagctggagtgcaagacagagcaagaccctgtctcaaaactcaaataaaataagctgggttattatctctaggtggacattgataaaaggtatggtatgttaggtaaaactttaaagcacagattgctagtgctggaaagcatctggacaatctcttcactttacagataagggatccgaaacccatagaggtggacataatgtccaagattacacagcagtaggtggactagcaggtccaggttgcaggtgtctcaactacaatccttattctttccattctaccacattgcctcccttccttggtacattctactgaaacttgatggatccttctccaactctgaagtgcacagagaatagaatttgagatcttcacatcccagagtctagtgcttcgttgctgcatctttagtgctcatagtattggtggagaggtacttggtcaaggagctgtaggacaccattcctttcctgttctggtgataagaagtgcagtaaaactaaggaatgcatactaagtgctcgaggaatacctgtgaaataattcagcagtaaattggtaatttggcaacaaatgacaagagactaaaaatgttattacctgatccactaattacacatgtagaatttatcctaagaaaatgttcagaaatagaaaccaatatctatatacaaaaatatccatcgcaacatttatacaagcgaaacttctacacaaatgtccaacaatagggaaaaagttaagtatattgggagtatatatatgtgtgtttatagatatatgatgacttactatagtgaagtaaatattctcattataaaattttaagcttagcttttttgttttattttaaagagagatcatttgtactggaaagttacattaaaggcccagcaaaatgcttacaacaacgcctagaggactccagacccattccccgggcaatctgaagatctgggacctacctacccaggcctcccttctcccacttaatagaggcaggtctgagggcctgggaggaagaaggcaccgcagagaagcaaggacaacagccttctcctctttgaaccagggtggccttataccaaaacatttattgaactcactgctaaggaactcatgtagagaggaactaaaagttataaataagttctggggtaaattctagccccaaatatactaaatttcatgtgtggcttcagctctttggatctgtcaccttgtctataaaacagtgggtttaatatatctgtccctaaggcatctatattctatacaatgataagaagactgggccgggcgcggtggctcacgcctgtaatcccagcactttgggagtctgaggcgggtggatcaccaagtcaggagatggagaccatcctggctaacatggtgaaactttgtctctactgaaaatacaaaaaattagccaggcgtggtggcagacgcctgtagtcccagctactcaggaggctgaggcaggagaatggcgtgagccctggaggcggaggttgcagtgagccaagacagcaccactgcactccagcctgggtgacagagcgagactctgtctcaaaaaaaaaaaaaagactgcattaaggaaatcccgtgaattcctccatgagcctgcctctgccccatcccaatctcccacactcttagaatgcagcaaaatgagagtcctgtttctagctctcgctctgcctctaatagaggtatgattgggattctccctttagtttaagcactatatgtcataaattatttttaatattacttaacattaatctgcagaattattacagatgacttttcttaaaacaaagactgattctgtcaactttattagtgcctactgtgttgtagtcactgcacccccataagttatccaatttcacagaaatccagatttttcaaaaatggttttggtctttaatggcctgaagggctgctactgaggggaggctgcagcagaggctgagcacaaccggtattgcttctcctatatgtgttgactttgtaaaggatccaggctattggccaactattatgtttaggatcttttgttaaaatggatcaaaatttgaactcacaattcaggttattccaacagccactggcagttaggttattcaattatggcttcattacaatcggcattaaggtctttttttttcttttctttagagagaaaatggtgggacagttaggaaggggtctcactatgttgtctaggctggtctccaactcctgagctcaagtaatcctcccacctcagcctcccaaagcactgggattataggcacgagtcactgtgcctggcctggcattagggtcttaagctcatttcgttctgttccttgaggattaatttggccagaacagttagtattcacaagtggcaacctaaaattaagtatgtgattcatatccaggatgaggcaagttcccttaggatcaacagggcctgcaaggcaaaggtttcctttagttgacctggatatgggtttattgcagtctgtgtgaccacctgtgtaggtgggtaaggagatgagagggcaacacgacatttgcctagtggcctataggcttactcacctgtattttttcaggttgaaatcatcagttgattcagcaaattttttatttatttatttatttagagacagagtctggctctgtcacccaggctggagtgcagtggtgcaatctcggctcactgcaacctttgcctcctgggttcaagcgattctcctgcctcacccccacaaagtagctgggattacaggcaccccccaccacacccggctaatttttgtattttagtagagacagggtttcaccgtgttggccaagtgggtctggagctcctgacctcaggtgatccgccctcctcaccctcccaaagtgcagggattacaggcatgagctgccacgcccggccaattcagcaaatttatgtgggattccacctagaactccaaaccaaggtgctctgaatatgtattggtagtataaacagaatccacagccctatcctggattataagctcgttagggaggtagcaaaatacatgacactgacctaagaacacatgaaaagcaaagaaacatgaatgcaaagtcatgtcatataagctgtttaaatcctgagtaagatgaatttaatttgcatctatcctactgacctataatccgtgactcacttgtctctctcctccagtagacatgactaggcatgacccatatagtactgaactttgtattcccagcaccttaccaaagtaggtgctgggaatacaaagaggagacaccccacaaatgttaaataaaacacttaatgaatggttctaggtaggtggggttgatcaaggaattatcttacaagtggtatgggttttttggttttttctgaggtgcagtctcaccatgttgcccaggtgattctcctgactcagcctcccaagtagctgggattacaggcactaatttttgtattttagtagagacagagtttcaccatgttggccaggtgggtctcgagctcctggcctcaggtggtccacctgcctctgcctcccaaagtgctgggattacaggtgtgagccaccgcgcccaacctagtctttttatagaacagttatctctgtagccaaacttacatcatattatttaattttccttgattcgggggaggggggagggatagcattaggagatatacctaatgctaaatgacgagttaatgggtgcagcacaccaacatggcacatgtatacatatgtaacaaacctccatgttgtgcatatgtaccttaaaacttaaagtataataaaataaaagatttacataaaacatttttccttgattctgtattaaaggaaagatgacattattttcaatgtctgcaaaatatttcactgatgggcatttagagtgtttccatttcccgctatcatagatactgctttaatgaatattttttgtttataaatagttttctttttttgtgtgtggatatagaatcttgctttgttgcccaggctggagtgcagtggcacaatctcggctcactgcaacctctgcctcccggattcaagcaattctcctgcctcagcctcccgagtagctgggactacaggcgcacgccgccacgcccagccgatttcttttgttcaggctggtcttgaactcctgagctcaggcaatccgcctgcctcgacctcccaaagtgctaggattataggcgtgaggcaccccgcctgacctataaatatttttctaagaacatttccttaggctatattcctaaacatggaattattgggaacatttttatttttctattttttttcatctcttcagtattcaaaacattcctaaattctggccgggtgcggtggctcacgcctgtaatcccagcactttgggaggccgaggcgggcagatcacgaggtcaggagatcaaagccatcctggctaacatggtgaaaccccaactctactaaaaatacaaaaacaaaattagctgggcgtggtggcgggcacctgtagtcccagctacttgggaggctaaggcaggagaatgccatgaacctgggaggtggagcttgcagcaagctgagatcaggccactgcactccagcctgggcgacagagcgagactccatctcaaaaaaaaaaaaaatcttaaatttctatataagttgtcaaactattttttccagtttaatcaacttacacttctaccagcagtatgagagcttttatcccactgcacagtcacataggaaaaatggtttatgtaaaggacctctcttctgttatttaatacccatgaatttcttatatagttgtaatcagcgaacccatactactttgggttctgcttatttcacggggaaggattctatatctatcaatatagttcacattctagccatttaaaatcattctttaattcttcattgtgttaacagatcccaataagcttggcgattttcttattgtcaggactcgggtttatttccagtttttgctattaaattggctatttctgcatctttgcacagtctcccctactttaccaagagtgaaactgcttgatcaaagaatagaaaatgttttgtagctcgcattagacactgccaagttgttgggcaaggtttttaaaaaaggaatattggctgtacagaggtgcagctgtgtggaccatcattcctgagcagggtccaatagcctggcatcttacctggaagtcaggacatctaaacttccctatgggaacttggtaagccccttccccatttcgaacctcaattttcttatctataaaatgaagaatttggatggaatgaattaatccttttctaccagaaatctagccatatttcacctagtctattctgtatcaccctctcctgactcctacgtgctcagaatctagctcagtgcttgggacagttatgtttcctttccctttgaagtgcccaaataccagtgtaatgagaaatatggcagagcctgagagttcagagcacaggccagggtcaaatctcagccctccacttacaagctgtgtgacaaaataacctcccccgggctcagtttcttcactgtaaattaggttaattgttccaacctcatagggttgttaggagaattaaatgagttaaggtttgcaaaacgctaagaacagtgcctggcacacagtaagtgctttataaagtgtttgttgaataaataaaattttggacctaaactctgggtctcttcaggactgcaacagctttgtaactggcaaccccacttttaggtgcgttcccactcctctaaaacccagagatctaaatgccaaatctctctgcttaaaaagtctcccagggctcctaggcgcctccaggctagaacagaaatgcctcagcttgaagacccaggcttttcaggtgaaacacctaagggtcaggagacgctaggatcatcactcaaggatcccagtgaatttttccaaaatacaataaaaataaaaacaaaaagaggcaaacagggttataaaaattgtggggcattttaaatgtttcattgaacaaattaaagcattaacagccctcccccaaccaccaccaagcccaagagaccgtaaatatgctgttcacaagataactgcaactttcaagggctctcaggctgctacttcgggcagcacaattggcggcacgacgtggcaagcaggcagtagtttccaaccctggagggtcagcgtctggagaccccggccaaggcatccacagcctaaagatgatgtccgcgaccgcccgggcagcctcgtgcacggaaaaacctcaaccccggccccgcccacccttcctgcggccaccccgcagccctggcccctcagtccatccactcctgcagcgcggccccgcacccagggcctgcactagaaccgctgttcctaccgcggcgccccctgggagccaacgccgcgatgcccgcctgacgtcaggaagtcgaatccggcggcgacgcctttagggagcccgcgagggggcgcgtgttggcagcccagctgtgagttgcccaagacccaccgggggacgggatctcgctccccgcgccacgaggctcggccaatgggaacgcgcgctgcgaggcccgccggtctgccctgcggtgctgaaaacccggcgcgcaggcggctggctctgggcgcgcgccagcaaatccactcctggagcccgcggaccccgagcacgcgcctgacagcccctgctggcccggcgcgcggcgtcgccaggccagctatggcccccgacccggtggccgccgagaccgcggctcagggacctaccccgcgctacttcacctgggacgaggtggcccagcgctcagggtgcgaggagcggtggctagtgatcgaccgtaaggtgtacaacatcagcgagttcacccgccggcatccagggggctcccgggtcatcagccactacgccgggcaggatgccacggtgagcgcagccaggcgggggcacaggagagggcgggaccggaggctgagtgcaggggagacagagttacgcactccgagccaaacaccgactaattcggaggaaagcccggaggcgcctgatcatacctgttgcccggtgattgggtgtcctgcggatgcgggatgaaaaggcgggagagaggcctggagaagtggagtctggggagtggggatggaggccaacaacacgcacacacaaacaaagggtcccgcctccctgccgtgcattccatctgcagccccgagcctcaggtctctgggcggggacagaaccccgagctgggtaggctaggagggaggagagcaaggatgcaggccgcctggggagggagggggtcagtggccaggggagggagtcacatcctgtctcgatggctaggagaggcagcgcagccgcgtctggacctaggtgccggtctccactcgccagcaggagcggagagggagcaggaaaggagcccattctcgaggatggggctgaaacgggaagcttggggagaccgctgccttggggacccctgcgtcgtgtgaagactggaggacgcggaagggacagcgctggccggggagggcaagcggccgctggcgtacataagggattgggaatggcatacacttagcgaggacccccagagctgttctcgaatcgccggggaggccactgagccgcaggccagcgaggtcttcagctattccgcggagcggaccgctgtttacgctctggggcggtaggcccttcgcggggtcctgtcccttcttcccttggtctcactgcggggtcggcgcgcgccccagccccaggcctgctgcttccctttctagaccacagccctcagagctaaggccccggcgcctctctgctgggttggagtcctggggactcagtcctagggactcgaaagtcggggcgttcccttcaccgcgtttcccccttggcggccagaatggcgtcccctccccttgcatccccctctgatcccgtgccctgcagcgtgatgccctccactgtccctatccactaccctggcgtcccagagtgtgccgcgggtcaccaggttcccataacgtcgcagcagagcttagacgctgcggggcgaagacccgccccaccctctgacgcgaccagcctagtgggcgaggccagagcttgcgcgggtcaaccagagtgaccactcgggagccctgactgcggccaagggcgcaggcgtgtcccggcgcatgcgcagacgaaacaggcaccaacgctggagcttcccgcagtgtgatttggggccgggaatgccgcggcggggacggcgattggtccgtatgtgtggtgccaccggccgccggctccgccccggcccccgccccacacgccgcatcacttacagggcccggggctgccggacctgccaacgtgaatcttatcgccatggaccttaccttgcacaacccaaagtagctgccttggggcagggggtggccagagtgcttagggaaatgtggagccctacccagaacaacggtggagggaaagggaagaaacgcagaagtgccccagttcggacgtagggaagtcttcctcttcgtggtttttggagaaccctagctaagagaggaaagggacttattgaaagacccgcaagaagggacggaagtctcatagccctgagaggtgaagccagctggagttgatgggtcgaatggggacctagagaacttttctgtatctagaggtttgtaaaatgcaccaatcagtgctctgtaaaaacgcaccaattggcgctctgtagctagctagaggtttgtaaaatgagccaatcagcaggacgtgggcagggacaactaagacaataaaagctggccaccccagccagctgctgcaacccgctccagttcccttacaggctgtggaagcattgttcttttgctcgtcacactaaaccttgctgctgctcattctttgggtctgcaaagagtgttattcctttaagagctataacagcgggaaggtccacggctccattcttgaagtcagtgagaccatacccgccggaaggaaccaacgcccgacacagccccacccatctctcctgtttctcacctatactgaaattcttgggcaaaagctgtctgtggacacacccaggggaaaggccagcccaggcaggtgtttcttagtggttcccctcagccaatgcttcccattccttgatgcatccttctaactagagcagatactcggtgatcttaaactgtggacacctgggagcaccctcaaaaggcagctgggcctagggagatggcctgtgcttctgtgtcaggagttggttccttcaggtgggctcgtggtctcgctgacgtcaagaatgaagccatgaaccttcgcggtgagtgttacagctcttacaggtggcgtggacccaaagagtgagcagcagcaagatttattgtgaagagcaaagaacaaagcttccacagcgtggaagggtacccgagcaggttgccgctgctggacgttggggggtgtgagggggagcagccttttttttttttttttttttttgagacggagtctccctgtcgcccaggctggagtgcagtggcgcgatctcggctcactgcaggctccgccctcccccggggttcacgccattctcctgcctcagcctcccgagtagctgggactacaggcgcccgctacctcgcccggctaattttttgtatttttagtagagacggggtttcactgtgttagccaggatggtctcgatctcctgacctcgtgatccacccgccttggcctcccaaagtgctgggattacaggcgtgagccaccgcgcccggccgggagcagcttttattcccttatttgtccctgcccatgtcctgctgatttgtccattttatagagcactgattggtccattttacagggtgctgattggtccattttacctctagctagctaaagagcacggattggtgcattttacaaacctctagctacagaaaagttctccaagtctgcactcgacccaggaagtccatctggcttcacctctcacttcaacttgggtacagccttctggcgggcaggaggatggcctttggtgcgaacactgccggagtccagggggctggctccctcacctttcatcttctcccggcacttgcaggatccctttgtggccttccacatcaacaagggccttgtgaagaagtatatgaactctctcctgattggagaactgtctccagagcagcccagctttgagcccaccaagaatgtaagaccctgtgtttgctatgtcgcaactattggttgttgagggggacagagagggggtggaaggagagtctagatgggatcacagtcatagtaatcacagtcagtagtagctctggggagtcttgaggtccctgcttctcttgcatagtcatgaggtcacaggcccaagggagcatggctttgcaacctatggctcccccaaggctgccactaccatggctgccatcattgttatcatcattgttatcatatgagcacttactatgcaccaagcataaactcataactcttacacatttacagatgagataacaggctcagggaggttaagcaacacagccaaggatcacacagttagtaaatggcagagcaaggacttagtcccctgaactcttaggcactatcccatggcacctcctcctgtcatcctcattgtcgtggtatctttgcctaggactgtggacttcccacagctacctcagtgggaggtccttgagcctgagagggcccttgtctccagtagcattggggtgcagatgagaagaataacagctcctcttcctcttctgcagaaagagctgacagatgagttccgggagctgcgggccacagtggagcggatggggctcatgaaggccaaccatgtcttcttcctgctgtacctgctgcacatcttgctgctggatggtgcagcctggctcaccctttgggtctttgggacgtcctttttgcccttcctcctctgtgcggtgctgctcagtgcagttcaggtgagagcctttggcttgtcaagtgcacagcaatgctcagcatccctggggaaagctccttgggtgtttgaggaaggccaagagtgcctgccctccaagcagggcagatctgaaggtatgcaggagtgagtgcaggaacatgcattctgctgtcttgacctgtctgctctttagccacatggacatcttcatttctctcactgcctttttagctgcttctccaagggttctcttcttcctatgcggtttgttctctgccacagcccacctgtgccaggagccaagtttctggtttcttagcaaagcttggctccctccccaccactgacattgcccaatatgttaataatgattgagcgctaattcttgactgtcaggacccatttggcaagccttctgctcatgtttcagtcctttctgtattctagatgtcagtccatcataagtcatgagcttcaggccaggtgtggtgactcatgtctgtaatcctagcactttgggaggccaaggtggccggatcacttgatctcagttcaagaccagcctggccaacgtggtgaaacctctactaaaaatacaaaaaggccaggcacagtggctcacgcctgtaataccagtaccttgggaggccaagatgggcagatcatttgaggtgaggagttcaagaccacctggccaacatggtgaaaccccgtctctattaaaatacaacagttagctgggagtggtggtgggtgcctgtaatcccagctacatgggaggctgaggcaggagaattgcttgaacctgggaagcgaaggttgcagtgagccgagttggcaccattgcactccagcctgggcaacagagcgacactctcaaaacaggccaggtatggtggctcacgcctgttatcccagcagtttgggaggccaaggtgggcagatcacctgaggtcaggagttcgagaccagcctggctaacatggtgaaacctcgactcttactaaaaatacaaaaaaatcagccaggcttggtggcgggcacctgtaatcccagctacttgggaggctgaggcaggagaattacttgaacccaggaggcggaggttgcagtgatctgaaaccgcaccattgcactccagcctgggcaacaagaacaaaactgtctcaaaaaaaaaaagtcatgagcttcggagctggcgaaacagaagaacagagaagggatggtgatttgccccaactcacgtgtgagtcagtggcagaggcagaactaggacccatgtttcctgactcctgaggtgcatcacaggccttggcagatgaaggaagtgggagaggctgaaggaggcatcgaggtcagtgaaggcgacactggggctggtgggctgctctcagtgttgactcttctcacctaggcccaggctggctggctgcagcatgactttgggcacctgtcggtcttcagcacctcaaagtggaaccatctgctacatcattttgtgattggccacctgaaggtcagtgggatggggaggagctctctaaaactccaggcaatgaagggctgccttgggggaagcttttcatactcgtgtccctgcttttctgtagggggcccccgccagttggtggaaccacatgcacttccagcaccatgccaagcccaactgcttccgcaaagacccagacatcaacatgcatcccttcttctttgccttggggaagatcctctctgtggaggtgcgtggaggtatcagtggaaaggtcttggggaataggaggcagccaacataggggagttggggaagatgcccacgatgttgtcagtgtgggcaagacactggggctgggctggctggggcttttgccattttggaagttctggaaggcaacaggcaatagatgggggctgcccaggagggagtcaccatcctccctagagagttcagtcagcaaaccgttactgcataaaaggcacctcattttgcaaaggatccagcggatgaccagaaggatccaaatgatgagatagcctatccttgaaggtgctgatggcacctcctggaggtgcttttttgacactcttgccccaggcaagtattccccttgcactttgtatttctctcccacacttaggtatccttcttgtcacagtcttctctgtccagggctggactgtcttactcttctttcatgtccaatatctggaacattcattcactgagtacttcttcccaccctgctgatccccagcctgatttcctgggtggtcagcgttgggtttgagatgtcgtctgaagttgtaagcagaaataatgtagctgctgaaggaataatgcctgggggtggagatctggtgagcttttagtgagcattaggcaatggaaggttctaaaaggccagcagaattctttgaaaagttcatttaaagccctttgtcccaaggctgtaggctgcagagttcttccaggtccacctcctccactttgtgacatttcagcttgcgaggaattaaattgtcgttaaaacacatttcagttctaggcatgagttcaaggtagcctggcgttcctctcgcccctggccatgagaactttgaaagggctttggcagcactggttggcctggcatgaggagctcatagcttgaggctcatgccccacctgtccataatgttcttattttcccatcatgagcatggacttgggtttgttacatgtccgataccattatggtcagtactatgcagatgacgaagcagccctgtcccccgtctgactcccatggctgcttcaagggcagtgtggttatttgctgggcagtggcatggggcttgtgcatttctactgtcactacagagggtttaaaaaaaagacatgggcaggttaagtggaagggaacagtctcacaccactacctttattgcttcttggtacttgggttttcaggaaattcctatcagcagacatcaaaaacagagaatgaagggacgcagttggcatgtgcctgtggtcccagctacttgggaggctgaggtgggagcatcgcttgagcccaggaggtgaaggctgcagtgagtatgatcacgccactgcactccagcctgggtaacagcgcaaccctgtgtgtaaaaataataattttttaaaaagattaaaaccaaaaaaaaattgtaaacagagttcaacgtaacttacagattaaaaacagtaaaatatgacagaaactgagaggtagtcatgatcagatatggcctccttcgggtgccgacatctgaactgagacctgaatgatgaaaagggccaacactgcaaaaattcagggaaggaacatttggaacagagagaacagtcaagtacagaggctcccggatgttcagggacagtaagcaatgagagaatgagaagaccagaaaactagggaggggccagatcatgtagggccttagaaagccatggtaagggtgtggtaagaagtttgggttttattccaatagcaatggggagtcacaggagggtttctggtgggtacagcaatctgctttgcactttaaaaggcttgctctggctggaggtggagaggatgaattatagagggtaggtataatcacagatataacctcagtgaggcggctggagcgagtccagaccagaccacggaggagcaggtgaagccaatggatttgggatatgttttggaggcagtgtaagcaacgcttgctgaggacctggatgtggtggtgagaatcaccccatctcgagcaacattaactgaggaaaaaattgaaaaaggggcgcccttgcttgggggcttcctattgtggaactgttatggaaaggagccccatccattgcttcctccttgaatggcaaatgcctttatgatccctataacttgtcccattatgtttagacccttggtggtcagaagggttctatttagggcagtgtcccctgcccctccttgtcctccaaaaattttgggaggcactgacgtggatgtcatggggtcagcacaggcatcaacatccccagagggatggaaccaagcagcctattgcccaggcattcactaacaggcagcccatcctcagcctcatagctggccggggagaagaaaggctattttgggtcccagatctttttttttttttttgagacagagtctcgctctgtcacccaggctgaagtgcaatggtgcggtctcagctcactacaacctccgcctcccgagttcaagagattctcctgcctcagcctcctgagtagctgggactacaggtgcgtaccaccaagcctggctaatttttgtgcttttagtagggacgtggtttcaccatgttgcccaggttggtctcaaactcctgggctcatgcagtccgcctacctcagcctcccaaagtgctgggattacaggcatgagccactgcacccggtctctgtttacaaatttatcaccagcttcatcccctaaggttataagctccatgagggtgggaagtctgtattgttcacctctgtatcctaagcatctagaacatagcccggcacacagtaggtgctgaagaacttgaatctgttaatgtagaaaggatgtttcatctagctgaagtgtcttgtacagaataaactctcaataaatgaactgtggacacatggaagggtgagctagagctctgctcaggggttgagtgctcctcttgtgcccttgtggttgtctggttacctgaactaattggagtgcgatgcagacatagtcatggagtgagacagcagaactttgctgtcttgtttgtgagcccacatcaggggttctagactggctggttgacatggtggccccagcctgtctcttcagcagctcggcttataaaaaataaccaccacctactggggaaaactgctggaaccttcagattgccaaattgttcttggtgtcttttccagaaatatttgccaaactcgaattagccttcaggagatttgataaagctcatgtttaagtcaagagaccaaaagattttgatggggagaattaggggctggatatagagggaatacttaacctgtataggggcagatatggttgtccatggagattctggtgtgaaaaagtacgatggcggccgggcgcactgcctcacacctgtaatcccagcactctgggaggctgaggtgggtggatcacctgaggttgggagttcaagaccagcctgaacaacatggagaaaccccatctctactaaaaatacaaaattagctgggcgtggaggcacatgcctgtaatcctagctacttgggaggctgaggcaggagaatcgcttgaacccagggaggcagaagttgtggtaagccaagatcgtgccattgcactccagcctgggcaacaagagcgagactccgtctaaaaaataaacaaaaaagtacgatgggagaaaggggagagggcagtggggcctggaaacctcatgacaaagagaatgaacacaagagggcctgtggtcctgtagactctgtgctgtgcacatccctcatgtgagcatgggccatccagctgcaggccatggtgtgacacactctgcagattacagtctagggcttcatgttccatgtgctggaggtaaggctgggcctcttggagctttccaatagcaccaacaagctgtcagccctggaggaggcctaaacctccaagcaaggaaaggtcaagtcacagagggaggaatcactggtctccgaatgctcatgtgtttgcttttcttcacagcttgggaaacagaagaaaaaatatatgccgtacaaccaccagcacaaatacttcttcctaagtgagtgtccccatccaacacaggggagctgcctcaggagggaatgctgagggaatgaggaggatgtggctgtccaagggattatggtattttaaggaaaggggctagaggaagtaccccactcccacccccagttactccctgcatgacagcagtttgccatctcagctgagcgaagtgaagttaggctgatgattggttgaaggcaaactagttcttcccatccaaccccagtttccactgggaagctgggtgtttggggtgtagaggggcctcttgctttatcctcaaccttatctttttttttttttttttgagacggagtcttgctctgtcgcccaggccggactgcggactgcagtggcgcaatctcggctcactgcaagctctccgcttcccgggttcacgccattctcctgcctcagcctcccgagtagctgggattacaggcacccgccaccgcgcccggctaattttttgtatttttagtagagacggggtttcaccttgttagccaggatggtctcgatctcctgacctcatgatccacccgcctcggcctcccaaagtgctgggattacaggcgtgagccaccgcgcccggcccctcaaccttatcttaaactttgtcaagatgggccaaggtaacctggtagagcccagtccaacccccagaggaacaaaggtacagatagttctggaaggatgggtcctgaggagagaatggaagagctgttagaacgaagaagatctttctgatgactgccacatattcccagctttaaaagtctgtcccagctactaaggaaactgaggtgggaccatcctttgagcccaggaatttggggctgcagtaagctccgattgtgccactgcactccagcctgggcaacagagtgagatcttgtttcttaaaacaacaacaactctgctccataatgcctaaaatgagctttaaacgcctttaaattttcaaattttttaaagaaggaagggaaggagtccactgatcttattttagtttgaaggaattcatcctaactgcctatcaccaactatcacgaatagagaaaggcgatggggcagaagggtagagcagagacctctggaagaaatagttttagaatccatggcacatcaagatggaggagccatgggtgagcattgtcatgctaggagttatgggtagcatcaggtgccacagagaagggctacagaaaaggaaatgaggaagcatgtagaatgcaacacttcttcaactcccagttttctttcaagagaggcccctctgttccgtcccacagctgacctccagggcttcagattggggtggcacaagcccatctccctagtttaaggaagtgagcttcacagcctgtgaaggatccacagggtccctcccaacacacacacactttcctgctcctgccccttcacctgcatggtggagctgccaggaacaaagggcagatgactgtagggacagggctgtggccaaggtaagtaagagagtattagcacccttttaaaagtgtgggatccttggagtgtgtatgtagaaaagagaagaaaaatgaaaaataataaaggtgtgggagcagagcaagtcccatgcgtggggcctgagttcccaagcacctgtcactgaagagtgccactcgcacccctcaccttccctggcatcctcttgggagtttttgccttccccagacttggatttatgcccaccttcagtgcctgctggttccagtggattgcagagcactcaagcacctggaggggagacagaagggatggttggaagaggcagccccctgctagaggccatctctcccaacatcaactggccctttcatgaccttcctgtgctcatgcctcctctttgtctcggtttcctccccagttgggcccccagccttgctgcctctctacttccagtggtatattttctattttgttatccagcgaaagaagtgggtggtgagtatccatggcccaagaagcccacatccttgtctccagcacccagagtgggggataggggttccccaggggaaacttgagactgactctaggcctaatttagaacaaaataatagaaccagacacagatcctccttatctctaagtgggacgaaatgatttgagcttagcaggcagcctgattcccaatgtgtaatttcatgcggtcagtgtctccagaggttcttgtactgggcataatgccagggggctgagttgggaatggggaagatgaatgagagacaatacctactttcaaggaaacttctgatgaagcagaatgtggttattaatcagaaaagaggtacaggcaataggttctggggactccaaaaggggcctgactgcacctggctttgtgaagtcacttttctagctggccttgaggctgggcagggtttctgacaggcagaggtggagcaggggggatgaactctgagcagagaagctggaaatgaggggtaagtttgaccaccagacatattgtggaggactagtgtcaggggaagagtatggtgcttggttcagtgatgagagatttgatcagggcactggcatggactgagccatggtcctggcagattcatttggcggcatgctgaaggatttagattggctaggaagagctagaggcaaagagaccttgtaggccttggtacttttgaaggggacatgcaagaagggctggggggtgccaatgggaatggaagaaaggagcagtggcactagatactgcaggattggacccctgagaagctgaagatgagtgagtctggataaccaggagaatggctgcaccatgcaaacaaagagctgctgagaggaagaggaagagttgttcgtgactgttatgctcgctgcttttctcactataggacttggcctggatgattaccttctacgtccgcttcttcctcacttatgtgccactattggggctgaaagccttcctgggccttttcttcatagtcaggtagtattcggtgggggcggatagggactggtgaaggaaatgttggggagtgaccagtctggtctaggggccgtgctggggctttgggtaacagtgggtgtttcaggagttggcttgggaaagtagacaggctggagcagttatctgaggggggaatcagaattctgggctctgtgtgtactgtttttgtctgtgtaatacatctaacaggttcctggaaagcaactggtttgtgtgggtgacacagatgaaccatattcccatgcacattgatcatgaccggaacatggactgggtttccacccaggtaagggacagtcactcagaagactggagcataacacaactattgaaaaggatgcgtaggtgaaaacagcaaaaacaaaaagtcccccaaacagcattttctcattagcctgaggctcttgttctgcaaccatgtgaagggagtgaccaagacagtctcatgtcccttcctcagccagctttacctggagaatgctgggctggcctttccatctgatattcaacatgctctcccctgaccttttccgccagctccaggccacatgcaatgtccacaagtctgccttcaatgactggttcagtggacacctcaacttccagattgagcaccagtgagtagggagcctggggaagcagggtcctggggagggtgtaagtgttgggtacaggtgggagcagagaagcaggaaccactgactcccccgttctccctaaagtctttttcccacgatgcctcgacacaattaccacaaagtggctcccctggtgcagtccttgtgtgccaagcatggcatagagtaccagtccaagcccctgctgtcagccttcgccgacatcatccagtgagtatctgagaccaggaagatggctagtagggagggaagagggcagggcaatggaaatgatgacatgtagggtggggagtgaacagaaggtgttcccagtcgtgtgggatggagttcaccatggcaaaggcaggattctttattggacctgtggccaggtcaggcctttgccctcattggggttcccctcagtaccatggcccaagctagctttctctaaagtagaggggaggaaaacctccagatggaagaaggccttaacctcactgctccatctccggtgggttcaactctgcttgtctccctcactgtctgcccccattttgtccctgcagctcactaaaggagtcagggcagctctggctagatgcctatcttcaccaataacaacagccaccctgcccagtctggaagaagaggaggaagactctggagccaaggcagaggggagcttgagggacaatgccactatagtttaatactcagagggggttgggtttggggacataaagcctctgactcaaactcctcccttttatcttctagccacagttctaagacccaaagtggggggtggacacagaagtccctaggagggaaggagctgttggggcaggggtgtaaattatttcctttttctagtttggcacatgcaggtagttggtgaacagagagaaccaggagggtaacagaagaggagggacctactgaacccagagtcaggaagagatttaacactaaaattccactcatgccgggcgtggtggcacgcgcctgtaatcccagctacccaggaggctgaggcaggagaatcgcttgaaccggggaggtggaggttgcagtgagctgagatcacgccattgtactccagcctgggcgacagagcaagactccatttcaaaaaaaaaaaaaaaatccactcatataaaaggtgagctcagctcactggtccatttctcagtggcttctccatcctcatttgcaaacctcagagggataaggcagttgaacctgatgagcaagaattataacagcaaggaaacattaatgcttagaattctgagatccagcacaactcagtctgtgggagctcagctcgctgcccagggataggtatgacctatgtctgccttaggctgctgggagatgccattctccagtttcagaagcaggcagggcaaaggtcaagactgtggtattggggtcttttggctctgaaggatcctggaaccactgattttggtttattccctccagggtctaaagagaacaagaggtgctagctcttaccaaaacagatggtagagagagttgctggctatttaaaaagctctttcatcttttaattcacctcttcttttcacctctttaaccactcctcaggaacagaacacttctaggactgggggtcttttagctccataagcaagtgagcagatgggacaagttagtcttttctccctagaaacaaaggggatgcccagtggtttccctttgcttcccaacctaaaatttcaagtttaataaaatagcaattagcagaagtgaccaaattgggagataattatcagtcatgaggaaagacacagatttcggtcataaagaatgtaagggctataagtagaaactttctataacctaaatgatgttatagaattatttttgagcaggagcagaaagattaaatatgatcacttcatacttctaaatcagaaataggaagattaaaaccacagaacagtttgtgatttctattgctgtagctaggtatcttactctgtccactcttgttcaagtatctaactcttctggaaaccaaataggctttagaagagattatcctatattcctatcagtataatactaaaatgtaactttttaatcatctggtttttaaaagataaacagtttagcccatctctccagagagcaaacataggaatatgactcaggagcctcctagggcttatcatcagccctcacacccgcttccccctccaacccacagcctttgcttccaggtggcaggattactactttgcctcttcagcagcatctactctaggcatattgatcattttagacactgggagaagagaacctcaaactaggaggaaaagacagagcctccacttagttttgggaggggatggcagacagtcaaggagatgagcgtcctaaggcatgttgggatagggtcagatgcaccacccatggagaggtttgtcaacacaaagacatggaaggttagaggtttgtcaacaaaaagacatggaaggttaggtttgtcaacacaaagacatggaagattagaggtttgtcaacacaaagacacaggaagaatgggctgcagaagatttagatgttttccatttgggcacattttacttagctggagaactaggtttaaaacagcctgggtaggaaaattagaagcaagctggatgcagtggctcatgcctgtaatcccaacacttttgggaggtccaggcaggaggatcacttgggcccaggaggtcaagcctgcagcgagctgagatcacaccactgcactccagcctggggtgatagaacaagaccctgtctcaaaaaaaaaaaaaacaacaaaaacttagaattgaggagttgtacctccattggcttcctcactccaaaataggtgctgatccttcctattcctattctttgccaccttttgggtgtggtgtcaccagcctgtttagccaagtagctttgggcataggctgcccaatctgagcaaacaccagtgaggctctattgagccaagaccaagtcctcaaagcacctgaaccactgtggccttctcagcctacagcagtgtggtctcttacatggccacaaagggacacacagtgacaaaaggctcggaatgttacaatggtaaaatgagtgatctcaaatccactgacagatataaaataggcttagagaggaaaagctgcctctggtcaagtagatcatggcagcatgaattccaactcacttttttacaactccaacttctatgtttatctttgttactttcacttttttacaacctggccagaggcattttttaaatcaggcccaatatcagtattctttttgtgtgtgccaattttgttatcacatccctatgaagttgaaaaataaagttaattttgaccaaaagacttcatttgtaacccatgatgttcatctgtgtgtgcacaggattcctgagtgcctctgctacgagttactgttcacctctctgtgctcttaagttcttgaatcactagactcccctttgtattgggcagaggaagaaacatcaggaccctccagaaaacaccaaggcaagggtgaagtatggcaaggaagagcaaggcaaagtccttctgatgactcccgtgttcaaatgtgagattgtcaataatctcaccaagtttcacacgtatcacttcctcctattcatgaggcaatgcccttgcccttttgtccttcagctttccattttgaattattttctctttatttttacacttacttgttttgagacaaggtctggctctatggcccaggctggagtgcagtggtgctgccatcttagttcactgcattctctgcctcccggcctcaagccatcttcccacctcaggctaattttttttttttttttttttttttttttttttttttttgagaccagagtttcactcttgctgctcaggctggagtgtagtggcgtgatctcagctgattgcagcctccgcctcctgggtccaagcaattctcctgcttcagcctcccgggtagctaggattataagcatacaccaccgcgcccagctaattttttatttttagtagagacagggtttcaccatggtggccaggctggtcttgaactcctggcctcaggtgatccacccgccttggcctcccaaagtgctgggattacaggcgtgagccactgcgcctggcctctctttacttttaaactcatttctagtttccaaatagtctccctaagtcctatctgcctaaatcttcctctgcaagtgtgatccctcagagcttgactgcagagcagtgcctcttaaccatccaactagaacagctctgagcaaaaacatttgtaggcatcattaatcttccctgcagtgtgcacacagaaagtcagattaacaaaattctataggagacaaacttaccttcaaaagacaaaagaaaaccactacattcttgaccaccacagggtataagcccttaattattaagagctactgcactgaggcaataactcctaagaaatcttaacatttcgccaggcaaggtggctcatcctgtaatcccagcactgggagagaatggcacacgtaatcctagcctttaggaggccaaggcgggaggattgcttgagcccaggagtttaagaccagcctgggcaacagtgagatcccatctttacaaaaaattgaaaaatcatccaggcatggtggcctgtgcctgtaatcccagctgcttgggaggctgaggtgggagaatcacttgagcccaggaggctgaggctgcagtgagccaagatcgcactactgaactccagcctgggtgacagagcaagagactctgtctcaaaaaaaaaaaaaaaaaagaaatcttaccgtctttagttcctatcaccattactgcagatttagaagcaatctacctgaatcagaaaatagagctcaaataagttgtgtggcttggtataatctgggaaaatcagtttcaaaagttacctgcccttgggatagaactttttgtcaacaccagttttcaaaaagtaccctagttatgaggccgttgctgggtaaactttatcccattccagcttcaaccagaggaacctgtacatcctaaagtttcacataagattacacttgaagaataggtttctccattaaaagacttgaaaactactggtcttcaggctccctacctgtttaatctgtcaagacattgccagcttaaatttcggacagttacataagtgtccctgttaacttcaaatggccctgacaggaatgctaaaacgtcagacattcaaatgggccaagctttatcaggattataaaactttcaaagctcaaaaacatgccatctctatgggaaacagtatcttggatttgatgttacaaaaggaacaagaaaatggtttctgaatggcagctttcagtttacaagtagtggcaaagtaaatgcttggatgttatgaggtagttgatctaaattgtgaggctttcttaaaggcactcctttgatctcatggagtgagagactagaaatctattcaacgtattaaaactcctctcccagcaaaataaaataaacaaaacatcctcctcctaatggctgaagttccatctagctgctatggccattttatggagcatggtgccatcttgtggccactctcaaaccacccattgttaatcaagtgcaattacagcatgttaagagtgaaaaggaaagctatttggagccatggtcacttgggatattttcaaatgttctcaaagaacatgacattttggttacttttagaattttattgacttttttcttcataactttaaaacaaaaacagcgcatgaaaaccagtgtcttattccaaagtctcaactcagctgattgccaggtgaacatcaccatcttactcctctgaataactagacacaaattacatagcaagttcgagtttctgcccacccaagacacagccagtaatcagtcacaaacacagacacagccaactccaggggctccagctttctgcccatcttctctcagcagttcctcccatctgctaagatgcgccttcctggtggctctctctcaaggtgggtcaaggctgaacaagacagaaaagcacagtctaggtccaccatcacctcccactggccaccagttggccagccaggaaatcatttctgtacatcttttgtctcccccttttatctccctctctcttctccaaaacttgttgctatctatcactttcatgtaacaatggacttagtgtccattaaactgcctgagaagtggtttgagcctgacatattttcctgagctaaaaaaggaaaagtacctctgtggccttcttgccattaagatcaagtaaaaaagggactagcactactgaaaagggtcacgctagaaaagccttagaatcctctctccaccccgtgaaggtttctctagctgtagctcttaagggtacaagacggcaaatattctggggtgaaggaggtataatggggaaacacatttattttccccttttaaacttccctgctgccccagtctttgccttcttcttagtggatcccttgggttctggctccttgcgcttagctgaagagagtgagccggtcaccttgaagaaatcatccaggcggccctgggtgctgccttggcggctcttactcagcctcttgaccccactgcggattcgctcctcagagaactgcttttcaccacacatgaacttgatcagctcttcttcatttggctcgctccacttcagctccacagactctgggtccagcacctcaggttccaagaagagctggtgagcctccttgtggagccaattttctggcacagggtacttgttggggtcaagtcgccgcacgatctcctcgatgctcttgtgcttctggatgaggtccacagcccgcttgggcccaataccccggatactctcacagtagtcactgcctagcaggatgcacagatccacaaactgttcctggttcaggcccagctcctgcagaatccggctcaggtggaattcctggattggcagctttttggcttcactggcagtcaggtgtcgcattagcacagggctgccgaaggtgaggcagtccatgtcctcggtagccgcagcatagactttgccagccttcaccagggcagcacagctggcctctgcctcactgggtgcatcaagataagggatgcccatgaggctcagcagatgtttgcactcatcattgtgctgcttagtgaccttcaccagccgcttagtgaatttttccacctcctgctcggccccagcagcctgagcctgctgcagctgcttctctgcctcagcccgccgctcactgcgtttggccagctcgcctgacttgagctgtggcggcttgccatcaaagacatacacgggcttgatgccgttctccatcatgcgaatggtgcggtagaacatgcccatcaggtggctggtggtctcaccctcctcattctgcagcacatccccaccctggcgaacagcaatcaggaactgataaatgctcatagaggcatcaatggccaccttacggccaaagtagctcttgatgtcattctcccggatggcactgggggccacatcagcaattagtttggccaggccttgaattcccatggcaacacagaggagggatgactaaaaaagaaaggcaagtcagagacggaggaaaggagaaaggttataactggtgttatctcaccaacttcatgccttcaactaaattccacacaacaaaaaggacaccatgtcagcactgctaaagataaaaagatgaacaaggtccccattctcaaaaaactcagtctagcaggagaatttactcaatagtaaggctcaacgagtaccagaaattgaaccacgtgcttagagaaataagatactgttgatattctaaggtagcagcattatttattacacaaaaaaaacctgcaacataggtctccatcaaggaccacagaaggccaggatgcttggcctggcttgaggagtccagggaccataatggcagacctgaaagacaggcaaatacaccagctaaacaaacagatctgatttgttttgagtctctggagaaccctgactaataaggcagccttgaaaaaggattgcaaacatatctgaatggaggtgatgtggctttctcacaagcttctctaaactctcttcatcatcgcctcagcacataagagtttctacttttattataatgttgctagagtttcaagtctttccctttgcgttttctcgccaccactcagtctgaaatgttaactccatggctcctccccaggtcctgatttaggggtctggcatgctgtagtcactgggctcaaaagagtattgcacttcagagttcagtgtttcccagatagcagtgtttcccaaatcaccctcacgatttttgctacttccaactaaaacccgtactttcattcacttagaattttttttaaaaaactaaactggaaaactcataagcaataatatttgtgttctattagttatattttaatatgtattaaatgtataactattaaaaaggatttttagggggtgcaatttaaaatcatcttgccatcctggccaacacggtgaaaccctgtctctactaaaaatacaaaaaaaaaaaaaattagctgggtgtggtggtgtgcacctgtaatcccagctactcgggaggctgaggcaggagaatcgcttgaacccaggaggcagagaatgcagtgagccgagattgtgccgctgcactccagcctagcaagagagtgagactccgtctcaaaaaaataaaaaactcatcttgtgcccactgttggtatgtgtccaatactccaagaaatattctactggggccaggcacagaggctctgggcagtaatcccagcactttgggaggccgtggtgggaggatcacatgagcccaggagttccaggctacagtgagctatgattgtgccaccacactccagcctgggcaacagagcaagaccctgtcaagaaaagaaaagaagacaaaagaaaagagaaagaagaaacgaaagactccatcaggccttttcattgttcccactctttcttcacagggttctttctagagcatcaatgactgttcaattcttccttctaattcagtccaaacacttcagcatggcatcacgatctttcatgttctggttcccaacctaaccctacattctgggatctcaacagaaagctggaataaggcccgccttttcccacttttccttagctgtgccctcctctcgccatcctctcacgcgtccttccaggtccatccctggattattaatcaattaataattaattgacaatgaattattcatttgattaatatgaataattcccctgtgaactgcagcggcaaaagctctggccttgaatctaggcgcggcatttaccatccgtgtgacattaccaagccactgaggtttattttctcgtctacagaagaagaacgattaccatgcctgtctctcagggctgctgccagggttaactgagacaacagacagaaacctctaatgtcccctctccaggcctgttcaacccttcggctcttgcctcaagccggccgcgctgctggagtgtggactgaggaccagaccatgtagcccttgatcccctcacggcgtcccacagacaggtaggcaggaaaggggcctaaacaactcaagtgtcagaaatgtttctcgtccaaggtcttaggaaaaatacaacacgaccccataaggtggaacttattaccgcttttctacaatggaggaaagagaggctcggagcttacgcgactggcccaaggctcacagggggaaaagtggcgggacctcttgactgcgaatcccgcgcactccagaccccggctccccacggcccccagcgccaagcggaccccgtcgctcccggaggcgcttcccatggggtctcacctggcctttgggacacgcggcctcggcggctaaagcttggttcggggttgccccgggcaggcggtcctaagctcgctctcccttctcagcttagcggcgggtggcctgacgttcagccgccttccaaagcccgcgctcccgtcacgtgacctgctcgccacgcacagcctcttggggcgcgtagtgcaggctgcgtcccctcagacggctgctctcatggcaaccagtccctccagggagaacagagtctctcagcgaccctggcgtacccttctccaccgcttgtccccactccacccacaccaggtccccgcaggcccctgctccctctacacccgaaatcgcaggactacaagtccctcaatgccacttgcgccggaggcacttccttttccggttgtgctaggcgcctgctcctgccgacgtgttcttccggtggcggagcggcggattagccttcgcggggcaaaatggtgagagcgttgaggggagttccagacggagatgcgaggacccctcggggtctgacccacaccgcgcttatctcctcagacgccggagatccagagggctagacgctcctggaacctccggcttgggctgaagggtggggaagggggaagccccttgccatgaactccttaggtttctcagctcgcgatttctaagggcgagaggcgtggggcgaattttgaataccttccagtttgtatatctctgttatcggtggtgtgttatctttatttggaaagttcttctgccgaacccgtgcccatcctacaatgccctgggcaaatgtttattggtgaagcacttccaactctcaggcacttggccagactttcctaggagcgcccacagcctctgtacagatctctggccacgttccatggacttctttgttttcggccacgcctcctagtgaccaccgtctgacgcgcatctagctctgggatgatgtctattcatctttgtattctcagtgccaaacagagggcccgtaattggaagctcaataaatggcagtgattgtctttatcattttgggggaagggggccgtgattgtttactgaattgaattccagtgtctcagaacaatgggggcagtttacttctctagagttgttatgttctggattttagaagcattggctgaccggtgacaatgaagttaacatttgtacagatctttacgtttacagccctctttcataaaagacattatctcatcatcttccctacagccttaggaaggaagcaaatacctgttgagcaaaatactccctgctaggcactagatgctttgattcatcatctttcttatttttcagttctgtgaaatagatattacagtcgctttactcagactcagattactcagaaccagaacttgaatgtcttgaccatagctcacaagattccataatagcataggtagtgaggaaaatactgaattagaaattgagggccaggcgcggtggttcactcctgtaatcccagcactttgggaggctgaggcgagcggatcaggaggtcagaagttcaagaccagcctggccagcaaggtgaaaccctgtctctcctaaaaatacaaaaaattagccgggcatggtggttcacgcctgtaatcccagctgctcgggaggctgaggcaggataatcacttgaacccagaaggcggagcttgcagtgagccgagttggcaccactgcactccaggcactccagcctgggcgatagagcaagactgtctggaaaaaaaaaaaaattgagcctgggcgcggcaactcacacctgtaatctcagtactttgggaggccgaggcaggcagatcacctgaggtcaggaattcaagaccatcctggccagcatggcaaaaccccatctctactaaaaatacaaaaattagatgtggtggtgcgcacctgtaatcctatagtcccagctactcgagaggctgaggtatgagaatctctagaacccgggaggcagaggttgcagtgagccgagatcgtgccactgccctccagcccgggcgacagagtgagacgccgtccaaaaaatgagactccgtcaaaaaaaaaagatattgagatctgggtaccaccagtcagtgacttatagcgggggttctcagcttggtgtctatagacactggtccacaaagctccggaaattgtaggcaaactttttcttgtatgtggtttttctcaggcagagagttcgtacctttagtcacgttttcatagtggtcagattattggcctcagaaaatgctaataagggccattgatctgcagctacatttccgggctaaaatcagcctctgtttcacggcagcaccaggctccttgataaccgcatgttctctccaggctgaaatcgtgggattctttgatagctctgatctctttccctcctctaggagctcgaggccatgagcagatataccagcccagtgaacccagctgtcttcccccatctgaccgtggtgcttttggccattggcatgttcttcaccgcctggttcttcgtgtatcctttcactgagcagccagaggaccagcattagtgatgtgggaagctcagggagaaaccacgctaggtacatggaccccgccggttttgtacattggattggggctgagagaaggtaaggaggagaggagggctagtgatgcccaggggcaggttatagccttatttcccaagttcaggtgagctcagtttgttctttggatttccaggacagtgagcaggggacctggctggagtggaggtggggaataggggtgctacagttggaaaggtggtataaggaagggtgcactcaggtgtcaggaggtctgagggctagtcccagctccggccctcatgagctgtgtgacctggggcaagtgacctaactcctctgggtctcattttcttcatggcagtggagcaccagagtccaaggcatctcttaggcccctctgcctggctgctctgagccagataggcctcccagaaggcattgagccaatgcttttctcctcagattgccgtgggctgggctctctgcactccacagtccaccccttcgctttgccttaactgctgtgcccagttacgaggtcacctctaccaagtacactcgtgatatctataaagagctcctcatctccttagtggcctcactcttcatgggctttggagtcctcttcctgctgctctgggttggcatctacgtgtgagcacccaagggtaagagctgcaatgggatggatgcgtgagcctccaaggcacagcccagggaagcctccccagagtcaggtcagcagggtccttaaagctcttaccagcatgaccccttggttgatggagacagactcagtggaatgggtagggacactagacatttgtgcctctttccctgcccctcatacggatttgagccaaatgtgactctcagttctgagctcacatggcccaaggcctcgatctgcctttgggatgtaccacctagaagtgtggacgcaggcatcccatggctgtacatttacattcttagaagtcagaccccagtgacttggagaggctgctgggaagtcagctggctgaaagggggtcaagatccagggcttaaaacttgctgcagacaatccaccaaacaggccactaggaatcagctctggtggctcatcctcagaggtgtgtgctcaatagcccttgccccaggagcacaggggtgcagggagagaaggaggaaagaagggccattggtcttattttgatacccctctcctcttttaggtaacaaccagatggcttcactgaaacctgcttttgtaaattacttttttttactgttgctggaagtgtcccacctgctgctcataataaatgcagatgtatagcagtcctgtctggggcccattctgcaggggtggtgggtgctgggacctacattgcttccccaatctcttccctttcccatttctcatctgcctttcacagttcctgctgctgatctacttaagggggatgagatttgtgtagcaccggtgttttgtcattggaatttaaggcttacctgtggatagggtctgggcctacccttttctattgtttctaggacaaacttctctgggaacccacatcggtccattctgccctaggccagtccctgccataaacatagccaccattctctgtgctggggcatcctcaccaggctcagcttctccccctaagaaggcttttctcctcagtggctacttttaatgcaggtgggcagcagcgggtgcgcaggaggggaaggtgtggccatgggagaggctgatgagtccactcctagccccaatatgaagctaagaggataaggggtatgaagcatccatttggccctctggttcaggcgctcagagattccaggcttctcaggaagaactttgaattccaattggccctagccttataggtgactcctctcccaccagaccaatcccaagaagagacaaggaggcaagctcagatacaaagcagtatttatacatttatttatatatgtatatttacttcagaagaaacgaacatttcggggacaggaagcaagcaggcccggggctgcttccctcactgcccacctcagagtcagagttggcacatgacaaataccaagctcagggagaagaactgggagttaactgggaagtagggggcgctctatgcacacgcaggcttctaagggtgcacggtatgggcaggaggatttgcactgggaggccctatgtacagcttgaagctagggggagattagcccagtgactacaggaacaaacgccaaaggagagagaagaagggagggatgacctgctggaccccagggcagggacagggccaagacactcacaccattgccagccgggcagctggcagcttccagcaggtggcccacttaccttccctgaagcccttttaccacaggcttaaggcaactttggtccaaggttgaccccctcaagcagcttggatccccagcctgtccccaactcctgcactgaggaacccctccccaggcttggaaacagagccagctgctaacggttttggggctgtgctgtgtccagatgggctccatggggcagtggacggtcactttccagttaaggactgagggcccgcagtccaagaacatgaacccccattgaggaagcccaggaatcctattacatggagtggggctcggcagttttaaggcatagggaggattcccccagtgggagggagaacaaagtcatcataaggaaggctcagcccctgcatggtttgggaatcgtaaaattcctatgtcaacggaaccaaattggggagggggctgggagcaagctatccctgctattcctgcatccccctgctcttccctatcctgaggacaagtgctttgagatcaatggcaaaagggggcctgcagttcataggcttcaaggaaaggcctccactatagaaaggcctcccattcaaagctgagaatgagtggtgggacaggggcaaggcctgcttcccaaagaggtggcagcataccacagggcaaggacagcaattccctttcccatttctggacccatggcagacatggctaaatgaatactacactccttccatgagcctggatgtagcctcggaatgcaccaggcaccactaagaaacttgaaggtggcacttaagatacaacttcttccctaacccagggtcttggtggttgggagtgggatgggtgtcggaggctccctgggagggatcagagtcagagccctgtctttgcaagtgtcacacccctgctctggcccactctgagctttctagctccatccttccattccttcctgccctggtttaagtgcatttagtaattacttcattaataacagcaaaagctatttgcatctgcccaccagccaagaccaggctgctgcttgagggattcctgctcctctgctcagagagaatgatgtggtcactgatcactgtgagctccagacgctcccaggaacgcaggcagtgaagctgcaataccatctgggggctcaaagggaatttcctcttcctggatattcctggttcaaggctctagggcttacctggcccactggcccctactggttcaggcctgtgaagggctgagggtggcttcaccaggcactgagtagacttaaggcacaaagtcagtttctccaacccaggcagggctggcctcggctgccctgggacttcttgggagccaagccctcccagggagaagaaacctcctgggccacacttaaagcttagaagtccgagtctggcgtaacaggcaaaccccagaaagtccactaccaagccatcccccagggaacagctttaagggggagagccgtctgccctccattgactcatgggggtccacccaagtctcttagggctggatccgagccccctgctgatctcaaaggtgggcaggtcctctctccaaaagggttggctccagtctcaaaaggggaggcaagggagaatgggctctgaacaaatcagggccacaggcttccccttccctccagggcacctgaaccagccctccaaccaccatatctggaaagaggtaaactggtcctgtcctggcccctagggggtggcaggcaggaaggcccaagaagtctctggctctcaggttccctctgtgccgtgaggggcgaccagctggaacagcaactccagtgtgaagacttccagtttcaccagtctcgggtagggccagtgaacagcagagctggcctgcagcgggctccagtgtaacaccattgcatccagtgttggggggtgcctgggcacccctggtccctggtgtggtgctgcctcaggagggcagctcagtcacacaggcggtagaagtggaagtggtagtctgtggctggctgggcgagagcctctgaactgcagttggcctgaccctgggtggaagggcagtgggaaggtgaggtggctctgggggtgcggggcagatggcactccctgctgacattgcttgacactgtgcccccagccctaccacatactgtgcaaaccccccattcctcaagccccacgtcgcagacaggggtgcccagacctccagggtaggtgggatgcccctgctcaccagcagtgccacccggaagtggtaggtgaattcacggaaggacaggatggttattggccaccggtgagaggtgccctggagagaagggagagaggggtcaggacagactgctgcccttatcccaaccagcatctctcaccacggccgtcgcagtcctggggtctgtggggagttttatgaaggaaaaaagcagagaactttgaagagataggaaggagcatgttctgctttggcagaaggagcaatggcagctactccatgcagaccgtgcccgggactggcaggtccacagccacctccacctggcccctgcctccttcccagtcctgttgtgctgggttccctcacccactatgctctgggcacatcaaagtatttcattagccccatcctcagtacaatccagtgacacagtgctgctactagccccatcttctggatgaggaaactgagccacttcctaaaaatcacacagtgtggcaaaatcacacagctgggattcaaacccaggtctgtctggctgtctccctcacagggtggcatgcagcctggctgcaggcagcttgcccatctacctgaggctttggctgtgcgtctgtgatgtggtttcaggcccgagcaccatgtctgctgtgtgtctagctgggctctccctctgtcttggaccctgtctcttctgcagggcgacagggctcgggcctccctcagaagcacccccacctctgttgcaggtgctttctgcacgtcttttctccctcactatagagtacgttcttggaagtcaaaacctgtgtctactccacctctctcccctgcagctaggcccacccagcacagggcctgggacagatggggccccaatcaatattttctgagtaaacacatgaatgggcaagaaaaaataatcactacttcccttcatttgtcctgagcgtcttctcccatggcctcttaggctcaagaagaaactgggggtccatcagccccagggacagtcataacttccggttacctggccagggaggagctcaccatccagttctcccagaagaggtggccaaacatggaacctgaggggccctctgatgctgtacatctagctgtgccacttccccaacctgagcatgaggtcggctccttcctgcttctgcagacacctccagtgagccacagccctccccgccatgggctcccagacacctgcctgtttccatcattgcactcatccacattagcacctgtgatctgctgtcttccccacgtctccagcacggcagggctgggagatgctcagcagagtgcaatgaacaaacacgggcacgcgtgcccctccctgggacacagaggcccaggccccagagtgtcccttgtggagaaggctttactctataactcccagcttctgctccttgcccattttggggcccagttgtgccaggagagaagcagctcgggcctggccggcccgcagcttcccagtcccacctacctgggtgtcctggtgggtgtggagactctgtggaaggctcccctcctcacatggttcctcctttgacctcaggctgcacagcaccacagacacgggggaggaggagctgtagacaggcccagttagcagagaaatgaggttctagagtccctcaaccccagccccctcccagccagcctgccacacgcctctgaatctccacccagcctgaaacaccgcataataaccagggccctcgaacaaaacctttcccatcgaccatcccatgtggtcctcagcccatgaggccaggtcatttagccagttaaccacgaagtaggcaatgaagtcagcacttatcccaccatgcaggaaataccagagactctccggctgtcctcagactcggctgttctgaggctctgcgggagattctccctggctcccctcctgcctcccacttccccacaccggcactcacttcatctgcagagtcaggctgaggtgcagtggggtgccactactgacagggatgtggtaggtgaagttcccaggcctgcaggggcaaaactggcaccttagcctgagggtaccctgccaccccccacccccaccagggactcctcagcccccaatctgtactggagccctccagaagagacagtgtccaagggtagcctggaaaggggctacccttccttatgggggaggctcctccctgaaagggcaagttccgggtgatctgtaccacctgggctcatgtcacctgaggacctccctgggtgaggggagggagcccagcccacctgcaggcatcccctggagcacagtactgggaggtgatggacatcgaattctccagcacctggatggaggtcagggagggcactggctctgcaaggagagaggctgttggggcaggagtaaggtgacaaggcaggacacaaatgagaagctggcaagtctttccttgccagacttgaagcagtcactcacaccttagtatgaataagttccaggttatttttttccagacctccacaatggccagcatcacactacaccctttcctcagcagccctaggactacccagttcccatgagcctgacgtctgcctcctcaaaagaactggaacacccagaagtagggatgggtcttcacatcccctgccaggtgtgcaggagcccgctcgaggcctgtgttcctgactgcgggcatctctcccagttctgggttcagaaacatcagttacactggtagcttgaaatcagcagtgttgacagcatcacacaaatcaggctcccctctgccccgaggccgatgattacaccgctaccagcacgctgctcctcgcagcctccctgaacaaaccgactgcaggctggctggctgggtaggggtgggactgaagtgtgacaagtcagatgggggagacaggacttcttgctcatctagttcacatacagtcttgctgctgcctgactatccacccaggaagggggaagctggggccgctgaacatttgctggacctggtacgttttcagctctgaggcatgacccagggacccaaggaccccaacaggatccaggacaccctgtgtggtcaggacaggtatcagatacagacgagatggaaggtgcccttcccacatcccttctgggcaaattccaaaggtcctttaaagagtcagctcaaatgtcaccaactccagagaagttttccctgatcctccccaccttcgtccggattaagtgtcctccccagtcccaaagctacctgcatgtcccctcagagcctcatcacactgctgtgttttcatctctgtgaggtctttggggacaggggcgtgtccatcttcatcacccccagtcccctgtacagagccagccacagagtggcaggcagctcagtaaacaggtgcctggcaaacatctcccccatggggttcccccatcacattgaatttccatctctgtaagccacattttccaggctttctttttcttgaagccacaaaatccatcagatgaaagttggtgagagcagagctgcctggttgaagccaggaagcctcccagcctccccttcaacccccagggcagcccccagcgcagcccccagggtacctcagaggaacccagtttgaaaactacaataaaaggttctgtagctttgttaaaaccaaagatccaaggtttgggaaatagtaggggagacccagtatagcaccctcctggtgctggcatggcgaaggaggagccaggctcgggatcaaatacaagccctgcctcggaggggctgtataaccctgggcaggtcacttcaccttagtctccatcccatttcttcagctgaacaataggaacaacaattcctttcttgcaggagtgctgtgaggactaaatgggatgatctatgtaaggctgcaggcctgattcctgatccttattctgtgctcagcaaacgtctattgactgacaagtctgaacccagacagtcacatgactgggctgaggtgggccctggccagtgagccttgccaggctgggctgggtagtgtcaggggtgcagcaagtacctgactggccctgggcccaggtgggctcagcagggcccacgctggactggagggcccctcggcgggcccggccatggaaaccaaggctgggactgttcttggctttgccctgccccccagggaaggggactgcagggctggccagaggctccagactcttgtgatgcttggagtggccaatgccattgactgaaagaccccaggacttggctctgatgttggtgactggcagaagggccatctggctggggcctgtggatagaaccaggcacaggctaagaagctggaagctggctgcttcctgtccagctgtctctagggccccacaagactgagtgaaccccatgtgtctcttggtcctctcaggggaacttcccagtcattgtccagagcctcgttctaggctccaggagaccctcccatcaatgagtatttgggcctttctctctacgcaggtagcccccgccccaagccccagcccacagaaagccttacctgagcggttggtgctggggctgggacttgggctgagaacatggccagggttaaagctggggccaagactaggaccagtggtagggttggtagtgggtgaggaacagcagatgacagggcaggggtggctggaacacatgtccaaggtgcggacagcagaacctggggccgagctggtgaggctggtggtcactgaggaggccagaggctgtatgagccagagaagccccaaagacagaacacagcaacctccctgtcctacccagacctgcccagacacgcacccagcagcaaagagggctgtatgcctggtagccccgtggtcaagggggactgtcggagctgcgtggtcccaaagctctggctggacctgctggggaaggatgggctgagctcagaggggctgggagagcttgaggggagagggcctgacagtcctggagaggcaggagggcaggaagaggcagagagggaggggagggaggcaggaagaggggcagcaggagccagaggagaggggcgctggtcagcacgtaccatgggcacaaggcctcactccccccagggggctggggccggagcagggccaggagacaggaagtggacacggcaaaagagctaaggggcagcaaaaaggcaaagggtgagacaggcaaaggggaagagaagagaagacacagtcagaggtggccccaggagctgggggtgacagtgggctcacagagcccaaggccctgccctggccctccttcctcctaccccatgttccaaccccagcccctcagacagccctgactcgcaggcccagctacctggaggggcactaaacaggccagacagaaacatcagcgtcagcagggactgggaaaggctgcccaccctccaaggaggccctccctggatccccacagcaccccagcaggctaagaggctaaggatgaactcctttagagaagacagtctcatggctctctgacctgggactgcccaccaaagccccacctggcctggcagcttggcttggcctccaggaacctacccatcagtgtctaccaggtcctcctctgtgcgcaggctcagcacgtacagtgtggacatggacaccacgctggagccacagaaaagggtgaccgttagagctggagccaccatccagtgccctctctctaggacaaggctgtggtccttgctcctgaggctgggctcccaggtgatgcctacaaaatgggtcaccccagaggggaagaggcagaaaggcccacctcaccgagacctcagctgcctgatctcccaagctacatcctcctcttcccccaggcctgagcccatgggcagctgactccactgggcagctccactcccctagtcagccaccatgagagcccaggggacaagtcacctgaaggccatgaccaccaccagggcaatgatggttccctgcaggaagcgctggctgatgcaggcctggtccggaaccacggacgatgactgaggaccaagaggaaaagtgcaaatgcaaagagggccaggctgaggctgtccccagtgggctctgctggaggtcggaggagcggttaagggggtgccccatttccccgggggcaaagggagaagaaagagaaacggggctgggagggctacagagtcacaaggagagggaagcaccagaggcagtgaggctggagaactgcaagccagaaagggaggccacaagggaggccccctttccaacccgcctgccatccctgctcacccctaccttgctggccaccttggggggcctcttcttgtgggggacgctgcccgcccgactgaactggctccctgcatggctgcagcaagagggccaggatcaggggtgtccctgggaagaagggtctcaccttcccccaccccgcacccctacctgaaggcgcccgagctgccggtggacttgaggctgtcgagccgccgcagcttggccagcttgtggctccagcgctccagctcatcaatgcgcgtctccaggttgtctgtcagcttgcacagctccttcacggcccctacgttctccatgaagatgcgctcctgccatgggccatgggccatgggccatgggccaacacagagggcccagtcagccccgggagccccaggctgccagacatcagggggcaggaggggcggccactgtccttggccactgggaggccctcaaagtctccctacctgggcgggcccctccaatccagcctcggctcccacagctcctgtgcctgtctccgagcaacacctccacctctgcaccttcacctgggctgtcccacctgcctgaatggccctccccactccctgccagagctctcctctcctaagcctgaaggctgcagccccgggatctgcccctcggatgactggtgtctcagatgtcagcacttcactattcagctggggtggagacctattacatgcctccttggcgcccagactcaggacaggtaagtgacaaacgtcgtcctcacaataaaccacgtatttcagcctggaggtaaccatacgaggatgtctgtgcagttctattaccgccctcattttaccgggggtggaaggccatggccctccacagggtttctcttgcccttgatcacacaggctccaggggccaaatccctacccactcatctccttgaacactcaccccttccctgtggggtgcagagggcgctctggaggcagcatgagagccgagggtgctcctgcctctgctttgcagtgcccccagtatctatggaggtgatgagtgttccccagctggctccccacttgcctctgggctccctcccattcccccacccacagaccttgttcaccaccaggaagttctctatggttttcccattggcaaagaccatgtctccggtgtctttcacagcctcaggcaagatctccttcacctcctgagcgatgacacctgggggcaggggacaagccaaagatgggtgggggggtggtaaagggctactcacagctttgtaatgtacagtgggagcaagactggagagggtgaagttctggaacccagagatttggattccaaggagccctggagcagggagatcccacgaaccagtgttcacaggattgcaattccagggctcaggtgtgaggttcctgggctggggtggggcggattcctgggggtaaggatcccagggcaagtgggtagtattctggcaggttaaaggtaggattcatctagcgcgaagggcgagggtccctgggccgtgattctcagatttccactgacaatggggcgaggttccggggacctggagaggtgcgattttccaaggtccgaggggcgggacttctagaaggcatgattcccaggggcgcagttccgggagtcaagaggagtaggatttccaggtgacagggggcaaggtcactgaggcccgaggtttctgggtttccggaccccagtccgcaccagcccggtccctacctgtctctggcgcggtggcctcgatgcccgcgctggcggcgaactcgggcttgtatctgtagtgcaccagccgcatgcgcgagatcctcttcaattgctcggtggtgtccacctgcggggagccaggcccgggaatgaacccctcctgcggccgtcccggagcaggccccggagcccaggagggcggcagcctggaggctgcagtgtggagaggagaccccaccactggagtggttagatcgggattcgaggccagcctccctcccttccttcccccgcagctccgcctttccgcgtagtcacgccccctccccaggagccccgcccccgcggcccgctccagcgtctggacccgcccggcccccacagccctgtccccacctcctgcacgtgttccttggcgcgcaggtcggaggggtgcataagcgagcccatgaccttgacattcccgtgcacaaccagcgcctcatccggccggtctgtgttgatgcccacgcggccgtggtggaagacggtgtcgggcacctgtgcccgctgccacaacacatcgctgtcgctctcgaactggcctgggttggaggcctaccgcgagttggggctggatcagtcctgggggatagggaggggacctgcagggccctgggagcagggggaaactccacagcagcccctccccttccagccagggtttctcactgcaccaagcccaacttgaactgtccctcccactgtgacaactttttgtcacttgtgggatcccagaagctaccaggcttcgtccacctccctgctttactgtggagaccctgcagcccagagagggtgggagctttgcccaaggccacacagccagtgcctagcaggatgagcatgcccactcctgactctcagtacccgggtacttctgcttgctgtttctcccagtcctggggagggctgtctacgccctgggaggaggtggccctcacccgcacaatgatgcgctctgagatctgggcggccagcgtgtagttctggttctgtgcatgagcctggagggccaccaccagcatgaagtacctgggacacacaggggtctcagaagtactcatggcctgcccccgcccccagggccaccctttccctggccagatgcatgttcatctcaccccctcctacagaggaggaacccgagcctccaccagggggcagaaattccccagggcccacagcaagaagccagggctgtttctcaacccagaagccaggcttctgctcttcccatccttaagtcaatgaagggctctaaatctcaggtctctcatctgtgaaatggctcagcctgtaggactctgtgcctggtgtgccacccagggcagtgtcttcctgcctcagaaatggaggggctccggggcagggcccccacctgctcacctctggtccgggttgggcttgcccttcttacgcatgttgttagcggtggtctcgctgaagtgcagccgccccacagtcaccttcgtgacctgctcagggggcagattgaccctgcagaggagaggcagggtgctcagggggcagggagggaggctgcaagagccacgccactgaggggcacccaggccagcaacgtacatgaggcggacaccctgggtacctccctggcccctccattcccaagccagctttagttgtggacccttctaggtaccacccccaacagggtcagacactcacgtgaccgggttgaagggccgcttgctccggtctgactgggactgctcgatgttaatggactggttcagggcctccagctgtggggagtgaagccagtggcacctcaggatggggctacccggctggtcctgccctcctgccccctctcagccaggcctggcccaactagagctcaccaggaaacagggcagcacccagccctcagccgcgattcccacaagctcagatgccttctgcatggtcacacccccccacaccctacttcacacccacaccctcctcacccctcacagcataccactcccccaacttctgcacagctacgcatgcagtcactccccaaacacccacacccccattccacacccacacgctccccccacctctgcatgtatgcactcacacacagacacacacacacactcacagccccaccctccctcatgtccatacccacacacctcacagcagcctccaagcccatccacttgcacctaggcccactcactccccagatcctctccatacccacgtctcctctactcctccacgtgcactggcagagccatgccaaggtaccatgcctggctcactcatcacaccgaagccgacagacccagccatgcccacagggagctcatagactcaaaatcagccactactggggttgtgctgtggtgcctcccaatgggtcttaggggaggggcccctggggaggggaccagcatggagtctgcctggagaggagggatgggtgttgggaagggcatccaaggcaaagggagccacagggtggagggcgggggctgcgatggtaccacaagtggcagagctggagcggagggcagggcccccaaggcccccgtggtgcagcttggaagccggggctttgctgggaggacactgggggccttggaaggatagggagtgctgtggccccctgagtctcaagtggggcaggagttgggggtcccagctgctgtggacattccgacaaggaagggaggtaacccagaccaggggatggacaggaaagaggcgaggaccggaccaggtagagggatcttccagggcaatagcaaggccagatgcatgatgaggttggggaaagagggccctgacccagatttgcggctcaggtaaccaaggccctgcgccccattccctgagaggggagcccagggtgggaggcaagtgtgcagggagtttagtttgggacctggagctgaggcacctggtagagggcccaggagatgggtcttgactggggttgcagacttgggaatcacaggctggagcaggaaacggggcgagagggaggcagggaggcaaggaggcacagagtcagggtaaggtgcccaacgagagggaagcaggctgaggagtctaacgtttaaggggcaggcacagggcgaaagggaggcagggaggcaggttgatgagcccaacaagagggaggcaggcgcagggcgagggggaggcaggctgaggggcaggcacagggataaaaggcgggagggcggggtggcagtagcagtgggggagtttacacacacatacacacacacacgcacacagatgcttgcttttttttttttcttttttttttttgagatgaagtcccgctctgttgccaggctggagtgcagtggcgtgatctcagccccctacaacctccgcctcccgggttcaaaggattttcctgcctgcctcagcctcccaagtagctgagattacaggcccgtactaccacgcctggctaatttttgtatttttagtatagatagggtttcaccatgttggccaggctggtcttgaactcctgacctcaagtgatctgcctgactcccaaagtgctgggattacaggcgtgagccacagcatccagccaacgcttgctttttctggggtctttcagtgcccccaaagggccctcctgccctcccttccttgctgagccccaaacttgccttcactccgtgcagcttcagatagaagcagtcgaggggcttgaggccctcgggcgtcttgacgtacttgggctcgcccagcatgccgatgtacactgtcacctggaagtggttcttcttctggcacacaaaggcgtcgtcgcccaccgaaaagttgaagcccttgtccgcatccacgcggtaggtgagcatgggcctgggggggcgggtgagggcactcccctgaggccccagagccgggcctggaacatcggttcctcctacctgctgggttccaaaaccatttcccacaccacacccctgcatcctcaaaccaccaatgcggctgcccccactcctgagaaatggaaactgagtcccggagaggattctagtacagggctgcaaactcctcagacaacattctctcctataccccatgccttaggccaccgccccgccctggtgatgggggaagcagggccagaccctgaggcccaccagactggagggaactcctgagtgggggagggcttgactgccctccccacactcggctccttcccagaaggctgcctgaagccccctcactcacccgagagggactgtgtctgcagagcctcacagcgcctgacagctagttgccctggaaacggtggaaccaggcgcctgctctgctgcagacccagcccctgcccaccggcttgctcaagcccccagatgccctcattcccactccctcctcattcctactccctccgtctgcccggggagggaaggggcactcctggactctccctcagactcagcctcagtttgcccatctgttgctgggtttagtgtcccatgtttggcccctttgagacacctctagttgacagtaaaaagagcaactgggccaggtgcggtggctcacgcctgtaatcccagcactttgggaggccaaggcaggcagatcatgaggtcaagagtttgagaccagcctggccaacatggtgaaaccccgcctctactaaaaatacaaaaatcagccgcctgtagtcccagctacttgggaggctgaggcaggagaattgcttgaacccaggaggcggaggttgcagtgagcagagatcatgccattgcactccagcctgggcaacagagcaagaccctgtctcaaaaaaaaaaaaaaaaagagcaactgttggcctgtggcttagcgcaccctcactcaggtccccaggcacaagagtggtcacaggagtgcccagtgctggcctggcggaagctgggcagggagaatgcttccaaacttgtgggaagaggcctctgggcctggccagtgttgccaaaggcctgggctcaccacctcttccctcctggagctccacccacctgcctgacctagcaaagcacccaggaagtgcctgggccacttccggggctgcagctgccaagcttcctggccttggggcctggggtggcaagggtggcccaaagagtatggcagtaagagtaaggggtttcctccccatgccagagaggctggagtgccatacgactgcacccccacctggcaggacttcatgggacccttcagccaccccagcagccagatgcccccaggcctgggactgctggctaagaattcccccaaagcctggagcacccaactccatgcagctggtctaatccactggcccaggcctggcaatatccacagttaccctgtcacctgcccactggccttctgggtgagccaggggagtggtccccacagggctcccggcctgcggcctggaaagatggagccatctgggtgttgagggggtgctaggaatgctcaggcagcctctgaccggatcctccccagcccctcctccctccctctagggagggggctgccgggagggcccagcttgggctcagcttccggctaccttcctggaatgcagagggaggaggtggggaaggaggaaccgggggaaaaaacacccatctgcccacttctccctgacttggttcccagctgcccctccctggcagtcatcaccttctcagggaggcctggggctggcctaggagtcaggagccctgactgccagtcctggctcttccctgagcctgtttgctcttctgtgaaatgagtgctcccaggccctgctccaggaccttgatggggtcctgggctggggcgtcccaaggtgggggggcctggaggagtggggagtgttgtagggcactcacagctccttgtagttagcatcgtacagggtcgcccacttgttctgctgatgaggctgccacttgatggactggtagttggggtccaggtaggagccactgaggctgtcactgtcctgcaggaggcctggagggagggaacgcccatgtgggccctgcaccttgggtcccacaccccaccttgaagagttggccagccatgtacctggggagggggcacctggcgggtgccaaggcggtgtctggacacgggcaatgctgagaggcaaggaaccagggcccggggagagcggaccctggggaggccagggtggcgatggggctcgagtggggtgcagaggcagggctgtcacggtcccaggctcctgtttgatcattccattcagcatctgggcattgagggtgctcgggggggattcagagtgcttcctcttcttggaggggtgtgtagggagcctggggaaacagaagtgtgcgccgtgggggctggctctccccgagcccctcccactgggtagtatccacctctctcccctctctagcctgtttgggccaggatgtgccccgcccagaggacacctccttcaggaagccctcaggctttgcctcctcctactccccattgctctgtgctgtcattttctgcttctgtcactcttcgcttcccccagactgtggacaggagccacacctgacttggtgtctccatcatgcccagcaacagggctggcttacagaatcacagcaatcgcttgaggaatgaatgagtttgtccctgcctgcagtgtcacactcaaggtcaccctttatagtgggggctccatggagagcaggccctgtgatcagaaacaagccacagagggcctgggccacaaaaaccagggaaggggagcttccgcacggcactccttccccttctggtttacaaaatgttttgacagcagaaccttcctttgaactaaacctttcatggaatctccacatgtaaaacagatgaaaagacaatcgtgcaggttgagtcagagtcgggggcttgggtctaggaagaagactcctcagaaacctgagggttccatgagacagctgcaaaatcactggggtctgggtaagagcacagccccgggcccagtcctggctctgcccctggctcatgatctggacgggacatttcccccatcagagcctcagtttacctacctgtgcccaccagataaggtagttgtgagcaattagccatggctgtaaacccctcaaggtattgctgggtaaacatgtataaatatgttacccccatctgccctgcagagccttctgccctccctgggtgcatcccggtccctacctccctctctggcctgcccgccgccctgcccaccctggtccctgtaccccaccttcccaccccatggagccagccacccacgtcttactcagctccgtgctgctgcaggagctggtgcagcatctgggactgctgggtgtggtgaagatcagtgggcaccagcccctgccccatggcagcgtagtgggggatcgggggctcggccttcatgtacagatcccgctgcaggacagggtagtgaggtgggggtggtgggggtggcggggggcctggcaagtgggctggaggtgggggcggatgctccaggcgggagggcactcccacgtggcacagtgtctcaggggttatcgtgcgcaggaggtggggctctgcaggagagatgggggagcgggcatctgagaccaacctcactcaggctcctgggcactgtcctcccaaggcagagtctcctgcttccaccccgtcctgagccaagcccgggggctgccccccacctaccctaggtgggagggccgttggtcagccacctactagaggcctgggcagggaggcacaaacctgcccaaggaggggcagcctttcacctcatcctagccacctcctgcccccaggctggaccaggagaatccaacccaaatctaaaggtccccctccgtccccatctcctctgaggcctgctcctcctctgggcctcaggaaggcgtctccggagacccccagcccaggcctgcccagtgttcccctctccggcaggcagtccctcttctgggctctcaggggccagccccccagcctgagcggggaggccccagctccctttgttccccaggaggcattccagggatgtttttggtaagataaacagaactcttgaccccaatccggactgcggggagcctgctcccgcggtggttctgctcttggccacctgggggccagggcacccctgagcaccctctaaggtgaggtgggcccggcctgggaagcctgcacccaggctgcacccacggccttccccagccacccacttaccgccgaagggtgcgtccatgatggcgcaggcgggcaggcgggtggcatcaccgcggggatacttgctcagaggcagggccaggctccccacccgcccgtggggaaacaatagccaagcgccagggagtatttgaccagcgataatctcagcccgttgggcagccgctggccccctccctcctcccctacctccctgataaggccgccccaactacttgcccaaaccctggagcaggagggcggtgcccgctggactcaccattcacctgctggggggagtaggcctcggagcccgagtctgggggagagtccggcagtgtgctgcgagagccaggggaaggggccggggggtgagcagctgagcttctgccttccagctgggcagcttctctgcgtggtagggtcccacagccccccagaagctggcgacactgaggtttcgtcacatccacccttaggggcatttctccgcaccacccacattggggtgcctggcagggcctggggccgaattgtgggtaggggaccgcccaggatcccctcagacctacagggcacttggggggcagttactagtgtccttgatgatggcacagggactcaaagactcccgccccagaccaaaggccaggacttcttctctcttcctgcacccactgaagccccacagcttcctggaaacacagggccctagggggctgggcctcagggcattcagcaggtcatggggggctgccccaccagaggcaggtgtggactgggaagggagccagcaccaccgggcctgggtttatttttttcttgcaggtttcacttttatcagtgttcaggaaaaagaacaaactcaacccaagaggtcaacacgtcctgcgtgaaccctgtgctcacccagcaagtggaaggctgtggccatatgggatccagctctttggccatccctggtccccacatctggagcaactccccattcccatgcccagggaactgccagagaggccatggccctgttgtggacacagccctggggctggctccagagtccccctgcatccctgtgccagccacccacccaccttcggggcctcatgtagaaacctatacaacgattcaagaacacagaccctgcaggttttgtgtgaatgatacaaaaacgtgtatggggactcaaacccatactcctcgccacagcctcaggccccctgggctgccactccgtcctgtacttccctgacaatggccaggccttctgtaatgtgttaaggtctttcacaccctgcagtccctgcagtcccatgccccaagtccacagcaccttgtgttctctcctcttaagttcctctggcacctgattattcctctacttggagatgtactggtgaatacctctccccagttaggcttcaggagccactgcagagccgtgtgtctgttttttttcttttctttcttttttttttttttttgagacagagtctcgctctgtcacccaggctggagtccagtggcacaatcaccactcactgtaacctccacctcccaggttcaaacgattcttgtgcctcagcctcccaagtagctgggattacaggcatgcgccaccacacccaactaatttttgtatttttagtacagacagggtttcaccatattgcccaggccggtctcaaactccaggcctcaagtgatctgcccacttcagcctgccaaagtgctgggattacaggcatgagccaccgcacctggccttttttttttttttttttttttgagacagggtcttactctgtccctagcagtggcatgatcacagctcactgtagcctcgacctccctggctcaaactattctctcacctcagcctctcgagtagctgggactataggcacacgccaccacacccagctaagttttgtattttttgtagagatggggtttcatcatgttgcagactggtcttgaactcctgggctcaagcaatatgcctaccttggccttccaaagtgctgggattacaggtgtgtgccaccacacccagcctcatgtctgtcttgtttatcacctagactcaggtctggccctgggtcccttcctggagtggccctgcccacagagtccctgtgtggctctggacaagcccctttccctctctgagcctcagtgtgccattaaaatcctgacggtagcagtggccagggctccttgtggggtctcccaggagctggatacccaggaaggctgatgagctcacgcaatcataggcacatgatacagcagtgggcaccagcaggcgcttaccaaatgttagttctcctccctctgcccccaggggcctgtagtttaggaacagcctcacagcctcaagcaaacagtttgccttctgcagcaaaggttcacccctggcaccccaagcctggcctccactcccttctccccaaaagccagggagctcaggaagcacggccggccatgtgtccatggccaccatgcacccagggcatcctctgtgcccttgttgcttcccacgataatcttgaggggtaagcatttgagggctcacttcacagaagaaactgaggccatgggttaccgaggcagacggctgataaatggggaagctgaagttggagccaggctgtctgaacacagagttcatgcacctagtgttttaatgctcttccacccagagacaggggcccctacatttgccctgagctcccctgcagacccatgctcccagcctcccgctgtgagcatgtgccccgggagctgccctggagtctggctggccgggtggctgcctggaacctttggtcaaagccaggcctaaggttcagccctgggtcaggcccttggtgtggactcctcagaaagatggggggaagggcctgggttctgggccccatgaggcttgcttgggtaggggggaactgaggtgccacatctgagccatgggccagctcctgtggccacagtacacgtcagctggatgcgtaagtgggtgggcttggcgcgcgtgcacgggtatgcaggtgttcccatgaaggtaaacagtcacagcctccagtcccgccgcttcctgtccactctccacacagcatcgagatttttctagcacttacgtcagccctcatcactcccatgcttggaagctttgtggctgcccactgcctcagaacaaagcccaggagtccccccttgacctggactcatcctcccttccctcacctgcccacgcacagccagtcacccagcccaacccatgccaggccagtgtctagcacctcccaggtcacggccacagccctgctccctgcctgcccctatgccgctgtatccccctactccctgcccttactcaccctggggcatagggagccttgggctcagccttgatggggggcccggtgccccccgggaagggcttgggggcagcgcccatgccgttgttgttgttgcagttcagcggggtgccgtagcccgggggtgggaggggaccatggcgccccggggagggtccacccccaggggggctcaggtggtggaccccgctggagccaggcatcgcaggctgcccgtgggagtaggaggccgagctggctggagcagagatgtcagggaagcagctgcggggaaggggggcggctcagctccagccaggaccccagccccagcagggaagtagccgccccctccctgcagggaactatggagatttcggaggagtcagtggctgggaagggacgaggagcagctttcagaggtgggaccacagcagaccccaggtccggccctcagacctccctggtgacagaagggaggcgaagggctggggctgggcgggtgcaggccgggcgagggggccactcacaggtcggaggcatcctccttgctgatgtactcctccaggatgctggtgtctatgttggagggctccagggcaccgttgatgtcgtggcctgcagggcaggagagatgggctagggaagaggcccagctccctgcagaccctgggcttcagggcccagccctccatccctgcccaggctggccctccaaaacagatgcccctgctccttcccacccaggtatccatgtgggggccggctctcaccctccactgcctggcacccctccaggaagcactgataatgcccccccgccccaccacaaggccaccttgagtctcagaggaggagaggggcccagggcatggatctgggtacagagaggccgatcctgccatgcctctttctagctgtgtgacagggaacaagtcctttccactaatctgtcaaatggggtcactgtgcctctgtcttatggggtgctgtgaggcacaaatgaggtgcttactgagtcgagagccccgtgggtgcccactgccctcgatgggatggctcggacccaacaggcactgtcctgccgtgtcctccaggggtcagtccagatggcccagctccaggaacgcaggagcacgaggcctggctgagtgggaccatatatcctgggggcccacagggctgtgggagtctcctgcacccaggccctggccgcaggcgggagtggggatcagaatcaggagagctccctgcaccctcattggatatgcccatcaccctgttgggcacaggcgggggaacttagccccctttttccagaggaggcagaagcctagagaaggaagggcttgccccggcctcccagcagggaatgatggccgccagagctccactcctctgcctgccgccctctcctgggccctctgcgctggccccggccccaccaaggggaggggcccctagaggaaaggcagccagggctcttgggcatcatgagggaggacgggggaggtgccggcctttcccctcccagggtcaccttgcagggggagccagagggcggggtgataagggggctgacgtgggagatgcgtcaaccccgataatggaggacagccccacccacacggctgacccgggctggccagccccactgaggcaggagggcccctcccacaggcctctggagcctgagtctggggtctgccctctcctgttgagctcagacaggtccaggaacaaatcctggctcagccactccctgctgagtgaccttgggcaggtcacatgcactctctgcgcctcagtctcctcattcgtgcaatggggacatgtacagctatggcttcaaggggctgttttgagtatgaaacgagatgaggtgtgtgaagtgccagccactttagtgggtgctcatcggtcggaacagccgtcctcacttcccagccccagagccctggggtccccgggagccccccgcccaggcccctccctggcctcagccggcatttcaagaatgctgagccccgcttaggtgattaatgagcggctaagccctcctaggagtcacgcgctgcctgcgacaggccagggccctcctgctgacccccacccccagctcgcccagctaggaacaagggacacccaccacgcaccaccaatggccgtccagggcggtgtggccggggcaagagcagcttctcgagctgggcgtggccagtctgtgtgcctgggttccaggaccctgcctctgctcaagccccaccctgctgtaaccacgggtcccatttactgagtgcctactgtgtgccaggcattttgtgaatcaaatacattaataatcacaggagtttctttactttatttcttttttttttgagactgagtcttgctcggtctcccaggctggagtgcagtggtgcaatcttggttcactgcaacctccacctcccaggttccagcgattctcccacctcagcctcccgagtagctgagattacaggcgcccgccaccacacacggctaattttttgtatttttagtagagacagagtttcaccatgttggccaggctggtcttgaactcctgacctcaggtgatctgcccgcctcagcctcccaaagtgctgggattacaggcgtgagccaccacgcccagcctaatcacagaagtttcttatgcgcaaggcatcctgcaggctcttcacctgcggtgtgttactcaatcctcccagcccagaatgctgaccatgacagagacagtgacttgacagtggctcatagtgagtatctcccagtgcttctcaactcatcatggcgatgatgacaaagacagtggtggtgacagtgactgcagctcacactgactgcctaccacgccagggacgattctaagtgctttatgcattttccctctctaaacagtggggatgttcagataggtaacataatcaccatcccctgttcagagaggtcaagtctcttacccaaggcaacacggcaaggaggattccaaccaggtgcaggggtctgactccacgagggagagtgtgactggcggttgctgtgccttccccaccccacctggagcgtcgcccccaccctggccgctgaagctgcaagtttttgagcctgaacttggaatctacggtgaatgatgggctgatgcagtcatggtgttgctatttataacagacccagccccctcctctcctggccaggagcactcctaatcgcccctaatcctcctgcccacctccctcgggatagggggcctcaggcagaggcatcctgggagaccctaacgagaaccagatgtgctttgggggaggagggaccctcccgtgccagggtccgggcggacggaggatggaggaaggaggcgggaggagggaactgatggggcagcgttgcggggaggccagtgggtggggaagaagtttgagggttgggggctcggagggcctcctgaggaacgctgaccccacaccttctcctggaagccctggaggccgcgtcgtctctttcccacgccgctcggcccccagcccgcccgtgaaccacactggagatttctaacagactttccaggtggacaagacaagggtgggggcttgccgaagctgggatagagcccccaagaacccaggacaggggcagggtcccatgggcacactctcgggagcgcccctccccactgctcccaaaagagccccagaacatcactggagcccaagcaggggtacctgccaggcaggaagcggaacatgggccatatggctcgttctgatcctcaagacctctctgagagaagggaagccgggcccgccagaggctgcccgaggctgcccagggcccaataacccgaaaacagcaccatgagctcacaaaccagcatctctgtccttcccttctcaaacccttcaacaacttcccactgctggggagacacccggagccctctggcagtccaaggcctgacatggtcccctgcctgcccccgacagccttttctccttccccaggtcccctgcctcccctcctctccgtggtcagcccttgcctcctttccatcctccatcccacatcaaggccttcacacatgccattccatgctgttccctaagcctgagaaagccaggtcctattcaggctttaggttttgtcttaaatgtaaattcccccaagaggccatctctgactctcccattctgtttagcaagggatgggcaggggcgttgtaattcctcatcagttctttaccttcccgcctacacacaccccgctgggcaggatgagtgtctgtccaccacccgcccaccacccacagctcactcgcccagtggccactctgtgcccagccctgtgccatgcactttacatggctcatattgaattctcatcccaacctacaaggtaggtgattttctttttcttcattttatagatgaggaaactgaggctcagaaaggatgggcatgtgcccatagcttacaggggcaggcactgggctatgagcgctgccctgttctgtctctctgggatatagtatcccagcacacagcaggcacccaggaaatgttcacggagtggatgagccaagtggccagtgagggacctcggccaggccatgctgtggccagggccggggctacctggggcccctccaggtcctgcccctgccctgctgagctgtgtgcctcagctgctcctcattaattaggccctttattacctgcctggaacaggaaccagacactgccccttcccaggcaggctgcgatccagactatgggaaggcagccccctcccctccgctccgctcttctctcctcgtctccttaaggccaccccagctggccaggaaaggaacggagggcacccaagccaggtgcaggatgagagcaggcaggggcccaggtggtccctccacccaggacccctcccttccgcccctccttgtgcttatgtgcccccccccccaccagctgtggccgttggctgagtctcggccattgtcccggggaacgggggagggtggggacacggcacagtgggaggcttgtgccctgcccaccccctcccctgccccgtcaatgaggcacttgtcaattcatgccccaaacatggcggaaatcccgtcagccacgtggctgtgggtagggtgggccggggcccgaggatgctggccaggcttggtggatctgaacctggggtgcagaggacaccagggcccaggcctatttccgacaaccccagttgctctgagtgtcctctcagagcatctgaacctgaaggatgccctagcttcaggcagcagctgagggccagggtggtagcagtcaagggacagcccacctgggcataaccacgatgcccagagagacctccagagtcaaagaggcctgttttctaatgtggacttcccacttgatggctatgaccctcagcaagtgacctgagccctggcttccttctccatcagatggagcacgaatccctgccatggagtgaaccttaaacgaggtgacccccaggaggccattccgcagtcagggtgaaccgccctgtttccatctctcttaggactcccatctcctttcctgcctgcacgcctccgcccaggctgtcccctctcccccaggcccctccgccttgctgcacacgtgctccagagcctccgagggacatcctcaccttctcctaagtccctctgaggcatggtcagcactctgctgctattcttacacatgcacagcacagtccagcctccgggcctcggccccagccatcccttccagtgggtcagccttctgcgactgcctccctgcctgccctggcagcccctccccatcgccccagtcacagagggcccccagtgctgtggctcatctcccaaccagtttacatgggggcaaggcacagtggcctcacctcctttggtttgggctttctctctttattaatatgatctatggccaggcgcggtggctcacacctgtaatcccagcactttgggaggccgaggtgggcagatcacaaggtcaggagttcgagaccagcttgatcaacatggtgaaacgctgtctctcctaaaaatacaaaaattagccaggcatggtggcacgtgcctgtaatcccagctactcaggaggctgaggcaggagaatcacttgaaaccgggaggcggaggttgcagtgagccgagatcgtgccaccacactccagcctgggcgacagagtgagactctgtctcaaaaaaaaaaaatctataactgctagctgccctgcttcaggcttcaacttgtgaccagagccgtcttagtcaaaatgccttcaggtcagatgtttgcttgtgcaagcaaccctttgcctctccgcatcaaatctcagttagcttgggcccagcagccacacctgacaaagatggggctcttgagccgtttttttatcaggttcttcgatctgagtcacagtagtctttgttctctcccagcttcttaccaaaaatgcagaagagcccccacaggctgcctacagagacccctctcttttttttttacctttctttttgagacaaagtttcactctgttgcccaggctggagtgcagtggcacaatcttggctcactgcaacttccgcctcctgagttcaagtgattctcccacctcagcctcccaaggagctgggactacaggcgcctgccaccacgcctggctaattgttgtattttttgtagagacgggatttcactatgttggccaggctggtctcgaactcctgacctcaggtgatccacctgcctcggcctcccaaagtgctgggattacaggcatgagccactggcccagccggagaaccctctcttctaggagacccagaatctttagccacccttgggctatggctacatccactccaagtccccatgaagctgccgccctgtcctcaggtcaacataaggctgaactcacagccccaagatgctccaaagccaggtccaacagcaccgaggccagcagctgcgacctgttcctactctctcccacagggaccagggcaggcaggccaccaggtgccaggtagagaccctgcagcttggggtggacacaggtctccaccagggtcacctgtgcccatctgtgcctacacaccggtgtggccccacgcaggcacactgccaacacacacacatatatgtaagggcacaccctgcagtcaggtatccactgacatgcgcatgatcacgtaccacctgccccctactcacacatacacagtactgacacacagtggcatgccccacacatatacccacacacatgcgcacaccagcgttcatccgtgtgccttcattcattcagcagttatttactgagcacctgttatgtgccaggcaagcatagtgcccagctttggggctacagcagtgagcaaaagggacaaaagccttgcccacatggagctgacattctagggagcagagtcagatgacgagagcagcaaaatgcctagcattctagaaggttccagatggcggggacagccggtgcaaaagccctgaggtacgagcatgcctgtgcatgttcacacctcagcacacttcacaggtgtatatgccaggacacgcatgtacacaaacgctcactgacccgacgacaggcccaggcccacaggcacagcgtcacatgcatgggttaggttagtggccacccaggaagagctcccacctcctcttcttccctccaagccccctccccgcctgctgtcagaccctccctaagcagctccggctggagccaggccccactgagtgaactcagtgtcacaggcacaacttccctcctccaagctagcagggcaggggatggggatccccttgccccagccatggagggagaagagaggggagtgagggaggccggagggagataggatcctcaaactccacaaaggagagacagaggctgtggttgtgcactctggcggctgcacggaccccggtcagctggagggagaacttccctcactgatgcgacctggggcacagggaggacagaatgtccgggagccccctccatactctaggccggcagggggctccggacccaactgtactccccacccaggggctttgcccctcccccctcactccaggccttggcactcgtgggatctaactgctaacatcacccaaccttgaccatgtgagtgagggctctgaggtctagagaggtcaaggaggctgcacggacatcacctggcgtggccacccgtgctggagccacccctcagcatgtcaggaggagaggccccttccctgcccatcccaggctggcacagagctgggacccaggctccagtcccagctctgttgtggccaccttgagggagcctgacacatcatcgccttcctgtcctgcctcacagtccccctcagaaatgggaggccgtcacccacgcttccactgcaccccaggactccaggaagacaacgtgcaaagagcctgggtgcagcagatgaagtcacaatacagccaagcccctcctccttgctggcagcaagaacagaacccaaatctcagagggggaggtggggcgggccccactggatgtgccagggaccaggaccaggccacgctgggccagagctgtcatggttcaggccttgcacacagaaccacagaacatgttcaacaagccccctaagcttaggggcactgacctaccctggggactagtaatcttcaaggtagggcgcagaacacctgccatggaccaatggagtgttcaccaggccaggcacaatcttacctaatcaccccagaaaccctgggacggaggccctgccattacaactgcactcccgttttacagatgagaaagcggaggcacagcggtgccctgatacggccaagagaagcactgtgggtaagcaggagagctaggaacagaccccagctgccctcgctggcgaatgcacagaaccattacatcatcctaccccgagacccaaccaagaggtacccacaccccgtggcagccggggctgaaggcctggagataggagaggaggccccacatactccagcacccaaggcaatgagagaaactgaggcccaggaaggtgctaggtccgtgaagaggaaggtgggaaggtaaggcaggctgcctgggtagggcggggccacccagttaatgattcagttaataatttctgctcccagttccttatcagggagggcaaagtccaagggtggcagccaatgagcagctctgctgggctgttacccagcagcctctgctgccagggccctccagtctgtaaccccttgggagttggtaagtggggagtcaggcccccagggaaaaggccattctgccctcaaatgccctccttggctctacttaagaccccaaggagcactctgtccagccttccagtctcaggagagtccctgaggccaaagggttggtaactgcctgtttctcacccctgcactgaccccaggccctccagagaggtgctttctggggtgcgtcccccacccccgccgcctctgttcacatacccattgttgtcaccattgacctggagagcacttcctgcccaccccccacccctgccctgcactgggtgctggggacatggggatgagtcagaccccctactaccatttcctcccctgcctgggctcaggaaaccctgtgcctggccacccctcccatctacttactccctgggtgcaccagggacagacagagacaggctgacacgggccacagtgccacccccatcacgaagcccagctcagcccccggattcctgtccaggtgggagtcctctcttccaaatcatcaggtagtctctacctgggacctcctcctgccctctggaggcagagatgttggtccctgacaggtagccccctcaaccccaaggtactggtggcagagtagggagctgggggctaggtgtccactctggctaactctggccaactcccttctctctgagcctcagccagcgccattcccctccccttacccatcccacagccgggaagggtggctttcaaaccagtatcctggtgcttcaggggctgtgaggagcccagcccccattatccactgtatctgtcctatcaggagactatgagtttgtttgatggttaaaaaatcacattggaagcccctgctctggtccaacccacttacttaccctgggaggggaatgaggccagagaaggaagtcaccagtccagccacccatcagcttcagaaggggcgaaatcccaggcctccctcctccagccctggtggggctccagaggccgggcagaggcccactaaactccaagtggtctttccagcacctgctggaaggcgacttccctccatcctccaaggcccctgcacacccacctgctttctgggggacactggttgctcactcgagcctcatgtgcccctagaatctagggccagcaggcaccccttccaggctcggccattcatactctaacatgtctctccttcccagggctgggcagtgagcttcttcagagctgaggttcttctctgccaccccctcctgtcttgcaggtgaggaaaaaggacttaaagagggcaagagctctttgggggttccctgccaggcacagacggtcaccccactctcagtggtccagcctgcaccagaactctgaggtcctggcaggattctcagacactgccctgtcccgtgcctgccctggctctggagtccaaagcccccttataccatggcccggttacctgctggaagccagtgcatcctgcccggtgggtcccctctctgcaggccctgtgcccgccgatctgggctgccttgcctctctctaggggattagccgggcggtcacgggggcccggctgtaccagcctcgagggggccgctctgtcccggcctcccacctgaggtccaaagcgccttagcccccagcccaccaccggcacagggcaggacccagcacctatgcttggtgtgtgcccagggagggggaccacgtcaggtgagggggcgcgctgtgctgcagccccttcggtaaaaccctttcccagtctcccagcccagagccgagagcacagggactgctacccactgtccagagggatgaccaaggccaagtggggaccaggatgagagctcaggtgtccccagccccagccccgagtgtgacagcactcaagagtgacgcagccacggctcaaaagcacaacttcccgctccctcgcacttcacacactcacaagcacaccaggccctgccactcccaggccttctctcacacctacagtgggtcccccacatgggccttcccctcccaagtggcctggagaccctaggcctcaggggccacccacaccttcccccatcgcaggggctgggagctgtttccagcccagccctcctagacgggcagcctcacacccctcccctgctccccacagacattcttgagtctcctcttatctctctggagggagtagcgcagcctccccccgccaggccgctgcatggctaagccgtggcgtcagcccccaccccccaacccatggtcaggagggagccagggagtccaggccagccaggcccacccctctgctctctgtcagggcccagcgtcctggggcaggcagtgtggaggtcaagggagcctggcctgcgggtcctctgggtacctagcaggctcaaggcactccagacagtaacccaagcaagcacgaatgtctggtcccctcttccctgaaggtctcaaaccgcgtcaggcccctcgagagctcctatggatcaacagtgtctggggagagccagagccccgggacagatgcagggctgcctaagaccctcagatggcccacctgatgcagagtcaaccattcaatctagtccaagcctgaactcttgggttctgggtctgtggggtgtccagaatcctggagtgggatgactgaggcttaggggtgcccctgcctgggctgctcagccagcaggtgtgaacaagggttcctgcctcccaagtcacagagggagagaaactgaggcactggaagacctgcttctctcctccacaggactccacaggaatctggggcttgaaacttgggccttggttccctgccctgtagccctgataggttcacacatgaagggaaggttctcaatgcaccaaggagcaggatgtggccttagggactagagggagctcggggcaggggctggtctcgctgcattggtagacaggggcacaaaagggggccagagggtctggctagatgttccagggaggttctgagaagcggagtgggctgggaggcagtcagccagaacttcccctccccctcccactgtggtcccatccctccagaacccagcaccaggaggagtggtggccctgcaggaggggcaggggtcgtccaggaaaagacagggagttggttagatggaggagcagacctccaaaaccaatgtaggggtgggggcagaagaagatattatggggtgtatgtcaattccaccccagagggctcctttcggtcaagtgggggtgaggtcactctttgagggggcgaggtcagagaggcacagctccagggttggggggacatagtgctgaggagcctcagagggctggtgggatgcagttcacagcactagaagggtctcagagagcagaggtgaccggtggcagggatgtcagcttcaagaaggttccagccccaggagagcatgctagggaggggggtcccagccccaaacaggagagcagtcactaggcagcattgtggaaagcaggtggcagtctccaaggggatccaggctcgaaagtggtcctaccctcatggaagcacagtggggaggtcccagctcctagaagtcatgggggatggcgccaaccagaagggcacacagggggtcttggtctctaggcgggggtcacagattctgggaagcaggctggggtccagcctcaagaggtacggaaggtcctagaaggcacgccgggggtctgggccttgaatggggttgtatcccgcttggggttctggggaagcaaagtagagggtccccagactcgggaagtttgctgggggcgagagtgtcacaatttagggaaagttccgggtcctggaaggctcaaaggagtccggacctggaaggggacacagtcccaaggaagctgcgagttgaggagcggggagggggagcccaacttcagcggcggtgggtggtaaccgctgggggactcccagccccgggagcctgtcttggcgggctggtgccagcctgaaggagggtcccagccagaggaggcggaaacacagcgaggagccccagttcccggggagatcagccgggggttcccagcgccagagggtcgccgccgccagcccgcggtctctcaccttcgaagaagcgctgcagcgcctccgtctcgtccaccacctccatgtcccgcctgcccggcgcacactccagccgcggccccgctacagcccggcccgggggcgcggcatcgccggcgcggcccgcgcgacagtcccggctgggctccggctacggtcccgcccggtccgccgccgcgcttgccccccgcgcgtccctggcccggcccctgcccgccccacgcgccccgcccgccgcgcccagcgccccctgccggcccgcgccgcgcccagccccgccgcgggcaccacgctcccgactcctgcaggcggcgctcagcgctgggcagtcctaggcttgcggggcgcggggccgtcccgggtcgggggacgcgagaccgtcccaggcttgaggggcgcggggccttcccgggtcggggtgggggcgaagggccgcttggcctctgtggggtcgggactggaagggtgtgccctcgccgtcctcgccttcgtcttgcacgggacaagatgtcacgattccgaatccaaacctcagagacagcccccatccctctcgttagccacccacacaccccgctcagcaacaataacaacctgcatttagggaacgtgtgttatgtgccaggccacacaggcattatctcatgtactcctcacaggcaccttatcaaggagatgctgttgttacctgcattttacagatggggaaactgaggctcagtgcattaaggactgccaggaagccctgtcctgtggctgtgatgatggaaatgttccctgtgttgttcagtatggtagtcactggccacaagtgagcactggaaatgtgcctattgagactgaggaactgattttttcattttgtttaattgtaattaaacagttacgtgtggctgtggtattggacaatgcaggtctaaaagctccttttttttttgagatggagttctgctctgtcgcccaggctggagtgcaatggcgcgatctcagctcactgcaacatctgcctcctcggttcaagcgattctcctgcctcagcctcccgagtaactgggattacaggcgccaccacgctgggctaacttgtatttttagtagagacggggtttcctcatgttggccaggctggtctcgaactcctgaccttaggtgatcagcccacgttggcctcccaaactgctgggattacaggcatgagccaccgctccccgccctgcctaagagtttcaaggtcattaaagttcagagccaaatcctggctgccccgggaatccgagctctcctttgccgtggccctgtctggtataatgaaacctggaggttctaactcgatataagtccaggataaagcggttgtccttgtgcccctgccttcacccttatgactgactgcctccacatctctgtcctgcccaacttgcacagcctctcgtctcactgatatccccttcagttctcccaaatcaccctttctgaaacatacatccgatcatgtcattcctttgcaaaactaagtttccctttgcactcaaaacaatatctgaatgtcttgctctggtttctcaggccccgcctctaccactggcctcagctcttcccctctctccattgctcactgaataacagccaccaagacctccttgccattgctcaaacatgcaaggcctacacctgccacagggccttggcacatgctattccatctgtttacaatgcttgtctccacatggctacttctttgtagcagttggtctcagctcaaatgtcatgtccccaaccagcctacctaaagcagttctccctacctaggcctttcttgctcaccatgtaaaagattcctatttagtttctgttattatccttcttgctctagaatggaagccctacgagggcaagatatttttctgtatcggtcactgctatagcttcaacaccaagaacatgacctggcacacagtaggtgctcaataaatgtgttgaatgaatgtatggtggcatcttcaaactaccgaatccagtcaggcttcagtggctcacacctgtaatcccagcactttgggaggttgaggcaggaggattgcttgaggccaggagttcgagaccagcctgggcaacatggcaagaccctgtctctacaaaaaattaaaaaattaactaggcacggtggcacatgcctgtgatcccagctactggggaggctgaggaaggagaatcgcttgagcccaggaggttgaggctgcagtgaggctgcagtgagccatgtttgcaccactgcactccagcctgggcgacagagcaaaaccctgtctccaaacacaaacaaacaaacaaacaaaaatctacagaatcctggacctctgaaaccttgggagcggataattctggaatcccagacctagagaatcatcccgcttcagagtggctcaacttgaagcctctcgggacccttcaaggcagcacgtaaaagctggaaaaacctaccccacccaaccactgtttgacaagccactaaacagaggccagaggtgtgggggactgctggcagatcaagatgccaacgtagccagcttcggactctcacctctgccttgcagcatccccagggagggtggggcacaagccaggccaccccgtggggatggggtgagaggcctggaagccgctcccaccccagcctccctgtcagttctcagtggccagccgtgggggaggggcagccaatgcctgagccccagatgtggcccagtcagcaggcccatggtggcccgccgaaaagggtcaatgccacgacagttctggggttgggggagggggtgctgaggccggcgggtgcctcacaatgaggttttgtccctctgggggccgctctcagagctgttgctcttagatatatagaatgggattttgctggaggccccagctgtgtgtgctgaccgcagctccctcaccgcccccgcaggggctgggctgagaggggggagaggggccacactgagactcctattcttttccagctgatacaccccagaggtttttctccctccgcagactcccttaagacaattgttattctccaccctgcccctcctccacccggggtcaggcctgcctgcggacaaagtagacacccgcctacaccacgcgattctgagaaacggatttacattacgagtcgcctgggaccagccacagaaccagcttctctacaagcctccacatacccacggatctttcctccgtatcccacatactgcataactgaccatcatctaagttctcaccaccatccgttgagctacacattgtccctgtcctggtcagcaagggctggaggtagaagggaagactcgtactttgtccctaacgccccaactccattgcattataatcaattaagagtatagattattcaatctctagggtagccttgaagttggaaggggtggaatggagcctcctgttaaccctgtagcagctgacctggctaagggagctcaggccctgccatctcccctgttacactaggtcactgagcaaaggagcaactgtccccagggattttcatctctggactggaggaaagaggtggctgaaatgtcccagactcaagggctcagccaagagttgaggctgccatctgccaactccataatgaagttgggtcccaagcagcgctggggcagaggctggggcaggaaggtggctgggccggtgaaagtagcccaggggacttgcatacaaggacctaggggggcccatcaatggagatgagtcctcatctgtgcccctggcttctctaccgagccacagtgagtgaggggctgagatttcagccctagcccagcagacatggctgtcccctgtagccagctccacctagtccccaaggcctgccctctgtcctcagaggcctcatctataaagcacactcagtatccctgccttacagtggaggtaaagtgccaggtcagtgatcagtaaatggtgccctctccagttccaatcagctctcagcacccatcactgtcccttgagtgggagcagggccaggaggaggtggtagaccgaaggcagcactggggagagggatgctggcacctgagggttaatgggtaatgggcgtagaggccagcccaggagaaggtacagccctgtcctccccaccgtgggactctcctggcctcctgtggacccacacagcactggcatcaggccatttcgcagaggaagaggagggctcaaagtggggtgagtgtcaatccagcaagccagtgaggctggtggtccagcttccccggactagggcccaagggcacacctgagtgtggggtcctgcagggtagaccccttcctgactgcaggggcaccgggacaggagggggctgctgcaggtattgagtggagcgtgaggcagagtgcctctctagcccttcccagcactgccctctcaagaccctccccaatgccacaccctggctgcagccccgggcaagccacagagcctccctggccttcagtttcttctgcctgtgctgtgctcactggacaggataatttgcagaccattgagaccactgagggcaaagaacctctgaaagccatcaggtgtggtggaggccagagtcctaggctgagaggccctgattctggtccccagtctgtccccacctcccatgcgaccttgggcaggtcttcacccttgtttggcccgtttctgcttctgttcagtggctgtgggtgaagacaggctctaaggctgggggcattcttctatcactctccccagcccctcaccaaatagagccactggacactgggggccgagatgggggcagggtcaggggaagggaaaggtccggtcagcttggctgggtcagtgccgaggccagactctgcggccaaggcgggactgactggctgaacagcgccacctgctgtgtagagggggcaggccccaccacctgggccttccagccactccctaggcctcactgcccggaagctatgctggcctggggttcctgggctgcactgggtctggccaggtattttgcgccctctcaggaaagccctcagcaaagacttctagtggcccctgcatttcagtgctgtcccactgggatcttccacccctgcctgccctagctgtctgcattgttggggagggaggtgggcatggtcagactagcctggtcccccagtcgccagcttggcagtcttgggcagctaatcctctcagacccctcagggaggaaggggaggccagcaagctgtatctttccaggctgtagtatgaacgtgcacccgctggtacatctctcacacaggcaggactccgcaagtggctgccctcattcacagggggcttcaagggtcttctactccctccctgcaactcaaagtgtggccccgggccagggcactagccgagcaggagcaggtaagaaatctatacctgggccccaccccggaccactaaacccgcacctgcatttagcaagcgccccagtgagtcatgagcaccgtgaactttgagaaacgaagttctaacccaatacagacaaagggctggacctgaaccacccaaacacaccctgcgtcttgtgggtgaaacgggctctggtcccaaggaatctgtttcccccttaggctttctgttccatccagggaacagtggcagaggcccccccggcccccggccccatgccaaccccctgctctgctgcaacctcgacatcaaatttctacccagtccccacctgatgcaaagacattcgaggcagccagcgtgcttctacatccagtttatacacagctctatacaatatacagaaacctttatatacagatatatttatagaataagctatattaatttgtctctcctttttacagcaatattagtttggatctttcatacattaagtacaaaaaaagtctggggagaatggcacgtaagagagtgcatgagggtctgtggggcccggctgctcgctactgattgcatatggagtcgcccaggcccctgggaggacaggcccgcgcacttgtgctgcaggtctggggatggagtgggggtcggtctgagccgaacggggctgaggggggtggctcagaccccccagtgtggtatggggtggaggagggagacgtgcagcaggcccatccttcaagggcaaggtgggtaggagccaggttaggggtgggctgcccctgggtgcccaggattgagcccaagcctgccccagccccaagcctgaaacatggtgtggctgcagccttgggggtggggggtctgtccctgatggctcgtcctggggtggacgacatgcccacattagaggtcccaggacccaccctggcagaggaggaattaaaaggccagacatcaagtctctccctgtgactggccacggtgcttgtcagatctttcatctgagagtctgtcttgttttctaaactctaagagccactgattttgtcttgcttctgtgctgggctgaagctctgtatgcctcagcagggccagggtgtcctcgagtctggtgaaggcgggagttacagaggatgaggggaggcccagctccctctgtcagggtgggcaggggctcccaggacagccatccaggccagtcccagctgtgtggggagccgggggccagaattcaggcccccaggtaccagtgatcatgagagggaggtctcttggtcgggggagcctaggccacccagggaggctgcaggtggagccagaatgggagggaccatgccgctgcagaatgaaggcacgagcaggcggtcagccgtgcagtcagcgcctcggtacacaccagttttccaaaacgggtcacagcagcaggcgcgatgggaacagatggtgcctaaagctgagcttgtccctgcgaccctgcctcaaaggccccatcatgctcccctaccgttttcttggcaggctgggaggggcagcaggcaggcagggcaggtagggtgggcagccccagaggccccttccttaggaacggtgcacactcatgcacatgcatacgcgccaacactagcatgcacaccctcccaccccgcttctggggaaactccgggtcgctatctccctaactgcttcccaaacccagcaggggaggaagccctatggggacctcaggctaaaccgggactgctcccagccccaggcccctccctgggcagtggacagaggtctccagccaaggcccaccataccccactcttggccccacctcctaccaacaggacattgggggtgggagggaggaaggcctgctcccaggagggtgcccaggccagcgaggagggaaagctgaggggaacaggggtgtgttggttccagatcccagggcccagagctgcctaggcgtggtgggggtgacaccaaggggtgaggtggggccctcagaggaagggggctctcagtgccttccttccacccagggcactgactctgcagctggggtggtcacagcagtgcccaccaccctttgggtggtgaggatccttgggggtagaaggtaagccaggaagtagccagcaggcagggcaggcctgggtgcccaggacccatgggcagaggaggcagcatgagaggcacaaggcagagaaggggcggccctgaccccaccctcctctggcccctccaggcccctggctgccttgggccctgctcagaggacggctactgaacacatgattgggcggggggcttgcaagcccagaacacatcctgagccaagcccagcagcttctgtaaacatgtacagcactgcaggccacctcggcaggggcaccccagggggccggccagcaggcaccagatctggggggtggccaggacgatgccggcctggaccacagatgagaatacatgtgtcggggggcactgctctccacctggcccctgggagagcagccagcaggcagtgatgggaggcagcttgcccatggcctgtcctggagcagggggtgccagaatgcccccatggagggcagtcaggctgagtgtggcccacccagcaggctgcccaggctcctccccactccacacccttccccatctttccccatctgtggggccagatcccagccaccttggctctgggggtcctaagctgaggtagggatgcggacccccagctcagcagcgatgcctgtgcctgaggctaaactgcccctgggggtctgtccttaaagctgcccggcagggggcaggcaccaggtgcccacagggccacctgctcctgcctgggcccggctggccacgcaactggggtgctagcgtgctgagatgaccagctcatcttgcttggcggggctggctccgtggccagtgggggtagaagtccggatcttgtcagccgccaggcattcctggctactgaggcccgtgggcgtcaggtccatgagctcacccgaggagctgagcgggaaggagggcgagagtgagatgcccgaggaggggtcggctgagccggcaaagagccgtgggggcttgggcaccaggttgggctcgaactgggcacggagcaggatctcttgctggctgggggacttggggccctcagcgtagtcactggtggggctctcgggcaccaccatgcagtagaggtcttggaaggagctgctcttgctgtccaggttgaagaggctgtcgatgaactcggcgaattccagcacctgaggactgggcgagtcccccaggcgcccattgtgcagcgccagctccccgcgggaggccggcccgccacccccaccgccaacctcttcctcctcgtcattggccgcagcactggggggccgctcaggagtgacgccgccactgcccagggccgcctccaggggctgcgtgtcctgtgagtgcttggacaggctgtcggccgccagcagctcagtgcgcgagctcagggatgggttttcctcggggatggcagggtcaatgtagaagaggtggccttcatcacgctccagcacagcgtggaggctgggggagccccggatgctgcggaagcctgaggagcggcgcgagtcgaagctgtacagggactcagtgtccgagaggctctccatggtggccagtggtgcccgccgggcctgcagctccgccgccagccgctcctgggtagacagcagcagcagctccaccgggtcctggcgggccgccgccgcaaccactggcgacagcagccgcccctccgagaagccctccaggctcatctcagactgggacttgctcctgcagagggagaggagagcagggggtataagactcagaagggagaggggactgaaccccagctccctggctaaaaggaacttgcagggaataaagggtacagttcatttagcagttgttgatgatgtgcagcagggaatgcttattttctttttttttttttttttttgagacggagtctcgctctgtcgcccaggctggagtgcagtggcacgatcttggctcactgcaagctccgccctgggttcacgccattctcctgcctcagcctcccgagtagctgggactacaggtgcccgccaccatgcctggctaattttttgtattttttagtagagatggggtttcaccatgttagccaggatggtctcaatctgctgacctggtgatccgcctgcctcggcctcccaaagtgctgagattacaggcgtgagccaccgcgcccagccaggaatgattattttttaaaaacaactcacaagaacccaagatagaagacaaaagagttgatgctgggttgagccgcggggtccctgaggggctaaggccctgctggcagcactaggacttcaggagtgctgctggggttctctgcaccagaacccctgtcattgtaccaatgtgagaatgaggctctgatagactggctgccccagatcactcatgagcctgccccaggtcactcatgaggccacagtggaatgagagagacagagggagggaaggagggagggagggaaggaggaagggagggagggagggagggacagagggcagcagggagacagggaagggagagagccctgcacatagctgcccaactggttccaccccaatctcagagccagcaaccctgggtgccactcccagggatctcatcacttccttcctcatccgggtctcctcctgtctcccatgggccgcagccctctgctgggtggggagcctagtgcccctggctccgcagaccagcctgcagggaatgagtgacagggcagggagtgggtggcttgcagcagtcaccgcagccggaaatggacactggcttcttcatcgggttgtgcagctgccacaggaaatgcacaaatggcagggagagacgtccagttgtccctaccaagggccaggaagcagcctcttgaccagatctgtgaccaagcacacagggcctgtgtgggaaggtcctagaaaggcaggacaatcctcccctggaaggactaccacttaagagcctcgcacccctcaaagagtgtgtgaatagcaagggcgctgtggcccccatgtgcgtgcccctgtgagcatgtgtgcacgcctctgttcatgtgtatgagtgtgtagaccagacgtctgtgtatgtcagctggcttgtgtgtctgggtctgtgcacaggtgtattcatgcatttccatgagcacctgcctgtccacatgtgtccttgtatatgtgtctccacctttgtcttggtgtgtgtcttgtacatgtgcatgtctgtagggggtgacctgtgtacttataactaataattgtgtgcacatgtatgtgtgtaagcttcaatacaaatatgtaagtaaatgggtgtccatctgtttgcgtctaagtgtgtaagagtgaatctgtgcaggccggccatggtggttcacccctataatcccagcactttgggaggctgaggcgggcagatcacctgaggtcaggagttcaagaccagcctggccaacatggtgaaatcccatctctactaaaaatacaaaaattagctgggcacggtggcaggcgcctgtaatcccagctacttgggaggctgaggcaggataatcgcttgaacctgggaggtggaggttgcagtgagccaaggtcgcgccattgcactccggcctgggggaaaagagcgagacttcgtctcaaaaaaaaaaaaaaaaaaaaagagtgaatctgtgcttttgtggcccagggtttgtgggtctgtgtgcctcccctggctcatgtaggattcagggacagcaggctgtgggacagctggagcacagcaagagagccctagagcacagagggtgagtttgacccctcctgtgcacgtgtgcagagctgagcccagtgcatgcacaaaatgcatgtgcacacaagtctatgtgctctgaaccacactcaccctggggtggggctgggagtggccaaggctcacctgacgctgctgttgcggtggtctgcagtcggcagctccagggcaaggccagtgggcatgggcggccccgtggggagtggctgctgctggaagatgagctcaggagtcaggtccacctcggtagggctcaccatgaccttggctgcagagagcagagcggtcttccccttgttgtagttctccagcacctgaggacaggacagaggaggctgggggtggtggagggacatcaggccccatcgtggggccgatgtggagccagggcccaggcctctcaggccaagcaaagcctcatggagtcacttgggtcccactctcctcctcctgaggtcaccactccccaaggcctgagacttgcccatctggtcacgactcgccccacagcccggcgagtgctcctgccctacctgccttcagcctttccgcagccaggggatggctgcggctgtcgctgcttgcccattcatctgttaagggccaggtggccttccgggcctctgagctgagcctgcctcagggacaggcccctgggagtctccttatctcctccccaccatggggcaacgtggtgatgtggacagagccaggggtgtgaggttgaagtatttgagtggggctttctggcccagctacctacttctctgagccccagcacccttgtctgtaaaatcgggcagtgatctgatggtgcttacggggttctgatggggtgacagtgccttattccctggtggtaccctgccgggagctgcctcaccttgttgagcccctccatgaccacatagggcaggtgctcatgcagcatggctggcgagatgatcacctcattgaaggccttgttgtcgccccagatggcaaagtatgtgggctcctcctgctcacagcagctgagagggacatggacagaggggagttaagggtggggtggtggcctggccctcggtgccagggcctcctggctctgttctctgccctgctcagcagagctggcatggtttggaggcccctggcctgcctggcagcagggctctgttccctggcctggctcctgccctgccctcagcctgggaaaggctgacctcgagcctcagccatggtccctccacagccttcgacctgcttttggcctgggccacacctgctccacctgctgcacggcccagctcaccagctgtgtcaggggaggaagccgaccctggagggaggagccagggcccagccgtctgaaggagcacagtgggaaaggtctacccacttgcctgctcctattctctctcctggcgcagcccccaccttgctcacagctgtcttcgaggaattcccttggtgaaaccaagtgacaactgaggtgtgagctggccagggcctgaggggtgagccctccagggcacctacttttaaatggaccaccagtggggagagctgccctggggcacaccagggaagggctgacactggaggcaaagccagactatggagagagacgcctggagtcctgctcagggctggccttttgttccatttccagagcccgatgctggggaaacccctccatggaggccctgggccatcttctcccagcctccacccccagccccgagcggtgattgagccaaggccggccctgctctccactgcccctgccctggccactaccccctgcagcagcagaccctggcagaacctaccagcactgctctgcagggtggttgtggaccacgtggatgatgcggccgggcgggtagagtggagtgctggctgagagggctatagttaggtcgctggggtgggtccagagccgcgtgctggccagggtggtcacctctacctcctcaggcagctccgacttggggatgcatttggtggcccccacgatgatccgccactgcgcggggtggagtgggagagatggggacagagctaagtagcactggctggggggcaggggcagggggaccgagaaggggggctcagcaggtgagaggtgggcagtaagatggcaaaggggcaggggaagggcagtggccagagcattaaaggtcggtgcccacctgaagaggcagtggctgaggtgcacggtggccagacggccaataaggtgccaaggacagatgacatggaattgttgaatttcagggctggcaaggggctggaagcccagccaacccctcatctagtagatggggagacaggcctagtgaggggaagggacttattctggatcactccacaagtccgaggccaaacacaccctggagttgagtccagctggacctgccaggcctggcctgacaaaagcccaggactaatctggtgggagcagttccacctccccagaaccaggctcctccaggcaggcaaagtcccacaaagctttgctgccctgctcactgcctggcacctggtacctggcccagggccctgcctgccacagggtctagggcaccaaagctgggaacggtccagacggggctgagatggtgaatgggctgagggctcgcccggggcagggggcggggggcagggggtgaggaggggtgaccacacagaggaccctctcctcctgcgctggcctgcctcagtgtgcctggccaccatgtccccacccccacctggccaccccgtctgccagtgtcctccagagacctgatgcggattaggaagggctgaccctctcctcttggtcacagcagaaaatcagaacaaactgtacccaaatcctctccacaggtcattcccagccctccctgagcctagggaatctcagaggcttcggcagaggcctttcctcaccgctcaaagcctccagatcgctttctcctgactgtgggcagctcccagctctgtgtgatgggagcctctcggttcctgtcctgattctgttctaactttttatgtgagcaaatgcaagtccctcccactctgggtctcagtttccccatctgcacaatgacaggggatggatgggttgagcttggggatgctgagggtctgacttcctgaagttcccacaacaccagccacaccctgccctggccttccatggcagggcctcttgtgctttgtcccaagaaaccggtgggggtcaagggcagggacagatgaggctgcacagaggcagggtgcccaggtgggggctcactttgggcttggtgcttcgctgcaggacatccaggagctgtctgcggaagccttccagctgagagaggccaatcctggggagggaacgagacagggccgtcagccaggcctggtcagcggctatgagaggtatggggccaggggcggaggggcaggcacacgcctagcccctggaacaagaagacacgtcagccagggtcacggggtggagaggtgtccacagagcagctccccagagcagagctgaggagtgagaggacaggcagggcgggcgccagcacgtgcgttcacctgggcttctcaccactgggcaactaagggtggggaggggcgtggggtcccttgagagacaggaatcggactgagagagatgcgggggctgggggtggggagaggcctggaggagggaggaacagcctggcaagggaccatggagcggggccaaggactcacctggggacgaggtctttgcccagaaccacagcagtcacgaactccttggaatactccatcgcatcctcactgcaagggaagccgaagcagaagctaaggccaagggggcggggtggtggtgttccggaatcggggggcccagccacaagcaagccctgctcctgcactcctgggatggctcccggggagctggctggtggcaggctgggttgcctgctccctgctctgtctttcccactggtaaggctttgctaggtagatcctggggggcgcatggcatttcagagcccccaccctccaccctccaggccactcccagacctccatgtgaccagaagtcagactcccagtccagcccctagcaccagccaaccctcagcctccactggtcccaactgccccagccaactctgaagccccagatggctcacctcagcaggccccctggcggggagtaggcaaagcacttgagggtcggatactgtgggcgcagaaggaaggagaggatggcagcagtgcccgcgcccagggagtggcccaccacaatcaggccgtagtgtttggttccgcggccctggagaccgagagaagcctgagagccctgccccaatgcccgccaagcgactgtcttagccaacccaagggaggcagagggtcttcccatcttcccagagtcctgggatcttgtctgtgctgtgtgaatgctagggcacagagaaccaagatagggccccacagagcgactgcttaggcagactgttctaataaactcttatttacgcttccaaaccttgctcagaggttatgtccttggggaagcccttctgattttccaggagtggctcactccctctagtcattgcatctgtacctgggatggagctttttatcactataaacatgtggttacctgaccccatctctctaccctcactactagactgaagtctcctgaggccagagcctgctttgctttggaaagggcagctggtggcacctcaggagctacctgcacagaccgtggccagtgggcaggactcagttatcccctaggtagagcagcaccccttctctctgctctgtattttgagcctctccatgtttccttctgacaaacggttctgcagctatgaggcttaaaagccgtctgccctgaatcatctttgtgcctctagtgtctggcatgaatcaggtgcccaatgactgtaggtggggcggagcaggatgcccacaggacctggcacaaaagaggaggggttgggagccaggctggaagggattgcaggagcctggcttgtgtgggagttgtgaggctccatcacccatccatcctctcctctctgtgctgcgttggaggagggggacccaggtgtgaaaaggcttggtgccatggaaaattcctcaccaggtctcgcccaaaggcctgggacaggaccatctcctgctccagtttcttcttgatgtactcagctgagaggaccataccctgggtgggcaggaacagaagcaggtgttggtgggaggcctcccagtgaccagcaaacccacagtgacctgcagctcaggaaccctgccccatccatttttccctttgggcctcgtgacaacccagctgtgggggctggcagacacgctgatcctgtcacttccatttcacaggtgggaactgaggctcagaggggcagtgtggctaatgaagctggtatgatctctccgcagctgcctctcaggttcttccatggtcaggctctgggctgtgcagggcagtggggtcgcagcagtgggccgcaacgggccttccagactaattcatgcctctctgaccaatctcttccagtgagcccagcgagcagggaggaacccccaaccatacacgcctctgcacactggcagggcaggaaagaagcccaggggccctggggtccatgacgtgggttaccttgtggcccagccaggtgccgtggtgcccctccacggggaggcgctcagcatcacccgtcaggtcagtcagggcatccttggggagagaggagacaggtgagggggcggctaaagaggacaggaagagggaggcaggcacccccgggggctgggagccatgggcagcgtaccttgggggacagggtcccccggatactgatcaccactttcttcttgtcatggtccaccgccacgtagaagggcgtttcatagacctaggaggcgggcagctcgtgagcctgagcggccctggtggggccacactcagggaaagtgacctaggcaggtctccttcctggccaggaactctggctccaccagccacggagcctctgccgccagaaaggctgacgggctcccagggtcactggggatctcctcccgatcccagccacaggcctgccctgccctccccgctccttgctggctctggcagccctgagtgccaccacttgcccctgagtccaggtgatggctgcccctccctgcttctgccctcaattcctttccctaaagggctagggctcggcaacccaaacactgggtgtggggttgatgtctgctttcccagccccagaggtggtacaggcaagccagggtctggggaagagaagggggccacctctggtctgcccagctagggatgcctggaagctgcagccagccagcaccagccaagcaagggctcctgccggcctggaaggatagcctcagcaccctaggccctcagctgcctgctcctgacaccaggccccagccctgcccggcctcaccgcatcatggcaggaggtatagacgatgtccaccgcagtcatgttctcgtccaggaagtggcgccggatggcaatggcattacagccacagcagttgtcttcctcgatggtgactccaggggcgaaccgcggcctcgcaggacacaggcaacacctagggtggggtgacaagagagttcagggccagggagtccccgagggaacaaatgtctcctgccactgtccctggaaccagttccagttgggcattcagccccactgcctctaccaaattgcccttgctaagtcctagtgacccccacgtcaccaaatccactggccactcttagccttcctcttaactgagctcttggcggcacctgaccctgtgggcccttccctctccccacctggctggggccccctcctctctgggatctcccctccgggcagggcctactcagcgatgcacccaacactgaagccctggggtccctctgggggcactggctcctccatgcactcatgcagtcttgtgttttagacaccatctgcatgctcaggaatccaccccaggcctgccccaacacccagatgcttccatccaatggcctagccagcacctctctcggacacctgacaccctgccagctctcaaaccccttccctgcttgtgtaccccaaccctcctgaggtcttcccaaggcccctcggtggcttggcctctggcttgcaactgtctgtggctcctcagccctcacccccacggccatgccactcggtcagtacacgtactcggcttcccttcagactcagagctggactccaggcactccctcacctcccctacccctgccctggcagctctgcctgggactgtcatggtggcctcgactggcctccttgcacttgcccctacgctctcagctcagcaacagagtggcccttttaagataagttgagccacatcattttctttttaagaccctacagcaacgccctgtctaccccacctggctctggtctctctgacctgctgccagcgtgttcagcagcacctgagacagcgtggcctggcccttgctcctctgggcctctgttcaaacgtcctgtcacagtgaggtctctcttgccacctcatctaacagccagggctccccaggcccccagcactccccatcccaggcacctggctttatgtgggtccaaagtgcccatccgctccaccatgtgccctatttgccttgtctatgcgctgtccgcctcctcgctgggcagtgagcaccacagagaggtccacagctgtatccccagcacccaaacagggccaggtacacagtagcctccccacagaaatgaatgaggcagcctgggagctgggcacccagctaggtgcagcggcacctcaggccaccagagggagccagcatccaactgctaaggcaccagacgctggagcccacgtgactgggcctgccagctgtcacgggatgacagctgagattttattaagaagcttggattctggtgatgctaggaggtttgtcttcactcagagcatcacctgagtgactattacacactttccaatggggagagactttgctgagaaagccacagtgcttgctggggggacaaagccgatgtacaatgggagagcatggtcccccacactgcaggtcaagtggtgatgggccagggtctaggggctgagctcctgtgctcggcagctgttccctctccaacctcagctgagcatgaggctgtaacagtgtggcctttggagactggaggcttgagtttgaacccttgctgtatcacttcctgaccgcaagggcctggaggtcactcagccattctaagcctcagtttcctcttctgtaagagcaggtggtgacagctacttcacaaggctggtgtgagatcaagggtccaagatgcagaaatggtctggcctataataggttcttaataacgagtggctcctcgcttctccggtgacagggctgcctctgagtcagtgatgtgtgggccaggaggaccagtcaggggagcagggccagcaccccggatgggagggccctggggctcatccagggcagggctagggccaagccagaagcaggcctggctcgctgtgctctgcatgggctgagaactgctgccaggggagaggcctgggcccgaggcagatgggcagcccttctccctctggccaggctgttatggacaggctggggcactggactctggcctcctcccaacaccctgggctgcaggcctgcctctctctgccccacaggcacctggttcttccaggcaggggcctggctgggccctcatgaggtctagggactctgctctctctgcaacactaaggcacctaatacaaatgccagcacccctcctgtctgcagagcaccagagagccctgcctgccagtgataccctgggttctgaaacaccctatgggcaggcaggacagataccacctgttacagtttaggaaacaaaggctctaagagctgtccccacaccaccagtgagtaatggagcctggtgctcattttgaagagttctctgccacagctgggactcccagggatgcaggcaagaatgccaggcacatgcagctgacaaagatgggaagggggcatgaggtgctctagtcctctctgatcagtcgctggagggatggtgagaataaggccccgagagccacccagctttctgaggacagggagggcgctgcagagtgggtgtggctgctgtgggtcccaagggcaggggtgtcaaggaaagaagctgctgcccagcatgccagcctttccagaacgggagcccagggaactgtcctccttctgcctggcatgagctgagggcggagacacccaggacagggaggggttcctcctggagcaggcgcccttctctggcccacttaggaatgcagagtccacccagcccccaagcggtgggctgagcgcagagctaggctgcaggccaggtctggggctaaggcctttcctagatcctatgaagaaggttggagccttaactaacaggccttcttggtgccttttcaaagacctctatggattgggcctctctactaggaaagtcctttcttctagaaaggcagagcacatgaggggagccgagagaagggaagatgtgggcagaagggaatggctgagggggcagagagagaacgccagaaggggaggggaggcagcagtgtgggtgttatgcaatatctcatctagccctctccaaaaaattccacgaggtatgtatcaacatctccacttcgcagataaagaaactgaggctcagagaggtggacccacttgccccaggctgcaagtgacaacatctggattcgaacccataactgtgtgactccgaagcctacaacttcactgctcagggataacacagaactagaaaggttgaggcccagagaaggtgtagaaaagaagccattcagggcaaagcagtaggcgcagcccggtagcccttcctcacacaccacccgggaggagaggtgcaatcgctgggggatgggacaggggtactcacgagcaggaccgagccagttggcagaggccgcaggcgggcttccgcatcaggtacatgggccacccgtaggcagccagggcaaagagcatgtagtagcagacctctttgtagcggagcatctcttgctagaagagaggaggcagagggcggtcacctcctgcccttcctgcctacagcctcagggcccagcagttccccagggtgggagcctgcggacccaacccctggcagggaggggttgctggtcccctgttgaggtgtggggcccaggccttggaggaaggacactcctccaggtgataattgcatttccctaattatctccatgcaaccaggacacgaatcctcagagacctgtcctgttgctccagtctcagaattaatgatttggggacagaaaatcacttggtccatttccttgcctgttttccagagaagggaagagttgagggatgtgagtagtaatccccccacctcggcaatcagccctgagaagggcccttgatgctgggaaaatgtagccctgagaggccccagccctccagctgggcggcgtgtgtgggccttgggcaacagggcagccacgctaggccaggagaccaatcaccaaatctctggcccttgggttctttgactgcaaatattgggagccttcaacttgactcagccagctgcaggctcccagggctccgggcaggggctgcgttggtgggagactgggatctcttgggagaaaggcaccagtttgaaagccagtgtgtctgaggcccagcagccactgttgatgctgaggaggttattggctgctggggtggagggaggaagaggcaggggtgccccagcaaagtgtctgccagcttccagtctttcccgagtgccccaggcaccgggagagggaattagtcaccttgtaaaagttaaggagggtggttagtcaccttgtgaagtgaaataggtggcaccttgatcagggcccggaggggtggaaacatccctggccagctcagctgctcttcaggaacgagagtggagaggtaattatcctctccctgtcagaagctccctgcagccctgggggcggggtgggccctggcagcctctgccaggtggcaggtgtgaccctggcacctcgatgggagtcacttgatgggagtcacagctgcctgccctccccgctccctgtgaggagtgggagggagaaggtggtgagaacagccagggcagagcctggcaagcagaaatgggctggtttggggcacttactatggatgtggctatttttagagaggatacaaatgcctgctttagtggggagtagggacaggcagggaggactgaggcttttctagaggactgagtgttggttttttttttttcttctttttaagggacagtgcagctggagtgcagtggcaatcatagctcactgcagccctgatctcctgggctcaagcaatcctcctacctcagcctcccaagtagctggggtcacaggcatgtgccaccatgcttggctaattttttttttttttgtagagacagggtctcactatgttgcccaggctggtctcaaactcctggcctcaagcaatcctcccacctcggcctcccaaagtgctgggattgcaggcacaaggcagcacacgtggcctaaaggactgagatttctaagagacggaatcctttccatcagcatcctggctggcaccgaggcttcctggcactgtgatgggaatggctcgtgtcctctcagcacagctctggtagaaggtgtgcctagtgtcatttcacagattcaggatccagctcagaggggatgaggggcctgctggaggtcgcagcgacaggcatcagagcagatgcacgctccagccatttgcttcctgaggcagggcctgtttctcccggctgccagctgtggtttcagcctgggctgtactgggccctgggctgtactgggccctgggctgtgtgctgggccctgggctggggttctcccaccatgttactggcaccacctttccctattacacactggatttctacgaaaggcgattgagaaaaggttccactactaaaaaagcttggaaaccaagtactacgcccattgcgtttcattaacagcagcagcagcagcaaaaatgctagcagctcaccctggtgaagtgctctgtcatctcaagaggccaggaccagacacttctgaacttggtaaaggaattcaggggatttgtctgtcgaaccggtgtgaagtgggtggttctcgtgaggggcatgatctgagcagagaggctctctggagagccggggggagaccgggcaggggcaatgtggctggcactgcaagggcagctgggaggagtttgcttaggtcattgtggcagagtgggagggatggggacggggtggggtgagagttgatgtctgactcactgaattcttgaggtcgaggtacttggtgtttctggtcaccggcatcccagacaggaaggccaagatgtcattgtttgcctgtaagaccggcaggtgaagaaggacaatcactggcccaggcccggctgcatggctgggaaagggggcccaggccctggcgtccgcctgcttcccaaaggccgagaagcccaaacgagcatgcagcttctagttcttccaagattcagccacttttccaaaatctgaggtttccccatatttccagatgctccccttctacccaaaacatcaagcccctgaggacattcctggcccacagcaggcgaaaggtattttgtatgagacactgagaaaccctaactggggttggtgtgctggtggggatgtggggtgggcggagcggccacgcagaagaccgactcgggagctcaccacgtccactaagcctgtggttagaagtcctttgagggccagccccagaggcagccatgcacgacccagaaagtccctagagtagtagtcacggaaagcctggccgaaggacaagctcaggaaggcagggggagccagaggtaaaggtgacctccagggtccaagagagtgcgtggtcactggggagctgcgtgggagccgagccctccgctgcaggggccacagggaaggggcctgaaagaagggtggtgtggagaggtgacctggagaaggggctggtggtgctcacctcgtccagcacggcgttgcgcttggcccgctgccgctgccggagcagcaccaggccagcaatgatgtcggatggcacaatgtcaaggtcccggaagaactccgcaaagaggtaggcgatttctgagtaggcatcctacgaggtccaggaaggcaggaggcagtggcaggggagcaggagagaggacgagaggccaggagtaaatcccccagggctgggaggctgcagaagcaggtgtctgctcggggtcccctggacaggttctccccagcacctccacagcgcccactgagcctgaccccatgtggccctgtgaccctgagggccctgcccagggctcctagacctggcagtagccacccagccctctcctctccttggaattcgcatggtgcccactgtctaccaagagcaggcgccaacttgagccactcctttttgctttcccagacgctagaatcaaggccgggtggctctggctcatttctcctctagccattctctccagcacagaaaccaaactaagctcctggctgcctctgacccaccagctgggaccttggaagtccctcgtaaggcctctgtggagcctgccaggtctcagggcccctcccccagctacccacaggctgctggctcagtgacccccacaatgtgccctagaagggggtgtactctctggcccagtggtcccccatggcttctctccaggcccttggcctgaagacagtgcatgtctgggcctcagggcaggaggcgagccctgctggctggtgccctcttagtcttcccttcctggccccaggctgcagcccagagcctcttccctaacctgttaggagacgctgaggtgggaacaaccacatggcaatgaagtctgtctcactgggtctcgcccctgagtgtttggcacttgtaagtgactaaatcaagggctgcaaattcaaatgccgaatggagccaaacggagccagatactgctcggctccagctgaccggaggccctccagggcccacttcaccagattcagaaatacagaagtttatggaaatacccctgatttttaaatgctggcatccaattaaaatgtgtaagcaacacaacacacgctgatcaaaacatgcttgggaccagacctgccccctgaggccatcagtgtctaacaggacctttgccgtggggctctgctgtgatgtgctatcttttccccagactctgacaacagccccagctctgcccgtgcacccagaggggcaggcgtgccctccacacagcagccccagcctccatccgccaggggccggctctctgccctctgcatggcctgccttgcagcccagacccctcagaccgccccagagagacccaagggggtgctccccgcccaccagggaacctcgggggctttcttacacttgattactcactctacggctcaccaggggacgctggtgggcaggagccactcgaggcttcccggtggcttccgtggaaggcactttgctgtctgcctcagggaggagtggtctcctgacctcactggctctgctactaactagctgtgggacgctgagcaagtcactccacctctctgggcctcagctgcctgatctgtaaaatgaggggtgggactagatgatctctaaggtccctgcccgctgcggggcacccctggatgatcccggggcctgcctcccttccctccccttgggggccgcccccagctggccctgtcttccttctgcagtgccctggcattaagtccggccctctggtcactcctctgagctcccaggtgctgaaggctatgtgtccccatctaggaccgtgctaaacgcctatcggctttgccaggccttcttgattaatttgctgctggtgaaacgctacttttctttgtcttcaggtcaccctgactttgcatatttcttctcctaaactagagtataagttccaagggagttgatgcagtcttcacagctttctgttcccttgacaaagcaagtggacgtggtcctgcgtgctggagcgagtggctcagtgaataacaggccctgtgtgagcaggccatacttgctcacgctggaaacccagctccttcccaccagccctgccccatcctgctttgccaaaggagccaacagccccttaatcacctgaccacaggatgtgagccagaggggagcgacctcccagtacttactgactgggagtccttcgtccgcgtgcagcagaggaacactttgagccggcgcgaccagctggtggcttgaccctcctctaagcggtgcctgcaaagcaggagaggcggtatgtgtgaggtcagagggctggaccagaagagctgggacccagacgttatggaaacagggcaggctgttcccaggaccctaccaaagggttcccgcagtgggttctgggggagaacagggcccaggccctgccagagctggtggccagtggcctggctgctggccagcaggggccctccctgacagactcctgctagcctaagatggtgtgtgccgttggccaagggtgggtgggtggaagagagaggtggggagcagttgagaggctccttggcttttggaagactgaacacaggcaggctctggggcttcagagctgggagccctaagtgggggctaccctgcagctcaggtgtccaaaggctcaaaccctgggaggtcagcagggtgttgggcctccctgtcgtctcattctaaggcctggaacagaccttccagaaagacctgcttttccccagaaaggatttcagacacttacatacttacatactctacttacaggaaatctatggggctgagtaaggctctgcatttcccaattccttggatctgatacctaggtagggagagggctctacccctcacccacatggttgcccttgtctattctcaccccccaaccccatccccagtgggtctggctgctcagatggagaatcagggtctccaggagtctgtacccaaaggcagagcaatgggccagttattcacagaggttcctcctaggctggatgtctgcagtcagtgtgttgagcataaagataacagatccaacattaaaagtgcagacctccaaaccgagcaagaaggggctagcttgcttttgtgccatgtgcggccccttaaaagcctgatgctgggtggtcaggagaggaaggcaagggtggccctcatatgcattcaaggcacttaacatcaatctgtagtgacaggccaggccctttttgagcctcttggctcctccgtgtgtctaaggaccgcttcccgctctccaaccctggcttcataaggcaaatggccacaaggagaaggagggcaacagggtcttccagggctacgggaggcaggtagggaagggtgcagggaattgctactctggggacctgctggctcttagggacttggacagctgtacatcctaaaccaatgtcccaccttctggggcatgaagggacagtgtgctggccaagcagggttcccagagcactgtgggatgggtggtggtggccagctgggctgggagggaatatgggctttggggccttggctcccagacctgacattttgggctgggacgtggccacagcaggcacgggtgtggctctggctgcagtgctgagctgacgtggaaggtccacggggagccgaacacagcagtgcaggagggtgggacggtgagaattcctgccgggcagcgggggtccagacagcctgctccccaggtgcttgagccagctgctctgggctgcaggtgtggtgccagttctgcaccccagcagcaagacccacggcaggtgacctgccctctctgggacttggattcctcatctgtagaatggatctcacaaccatgccggggttcacaaagggattaaatggatgaattgcgtaaagggcttggcatggggagctccttacataatgcactgtagaagccccattaacaggaggtactgggacccaccctggaagcccctctctttttctttcaacaaacaaattattgtgacactacctggatgccctccctcattttgtctgccatggcacactttcccccatctttaaaacatcatgcaaaactcaccccctctaggaagctttccttgacttgcctctcccaatctctgaatcctagaggcagcctagcctaatttaatagctagttaagcgaggactctaaggccagactgcctgggctagttcccagccttaccattttctagctgtgtaacctcaggcaagtcccatcatctctctgtacctcagtttctccacccatattatggggaagttgacagctgtgtggtggacttgtaacttactacacgcaatgcttggcttcactgttattaccattgttattatcagcagtggacaatgatgacaacaactactattaaccgagcacttacccagtgtgagcactgtgttagtcactctgcaggtattagctcagttaaatctcacaacaacatgagacaagaattgttattattcccactttatagacaaggaaactgaggcagggagcagttaagccctttgactaatgcccacggctcacacgaggttggcatgcagtctgggaggcctggggtagccttctgaagaatggagacctctgcccaccagacagcaaagcccaccctgggactgcccacccagcccgctgactgaccgcaggttgtaggtccgcaggttacgctgcctcctcttggtggctctcagcttgacaaaggtgcggcccgtggggtcgaagacgcagaggacagtgatgcacacactgaggatgactacccagttgcagacaaccattcctgcgggcagcagtgggaggcattaggtaggggcgctggggacacctctctggctcacccgctctgaagaaagggacattggagcctccctaaccccaaatgcttctggggacaaaagccaggctccaaagcccctggtcccagtctctggccacatacgtggccaccctattgcccacccacaaccccaagggccactcttggctcagagcaggcagctctgtgggtttccaaggaggtgctgaggagcctcggcttgacctgagcagctctgtgcctgctgcagcccaccccagaccaggtagctggcaggcctcaagggtgagggaagcagtctcgcccagccaacctgctggtgcccccacagaaggcactgccctctggcaatgcccaagcttcttcctctctaaactgatctcatcccctgtgcccccggggctgctgaggctccagcaggcctcacccagacgtaccgagggtgacattcttggcagtgaggtcgttgcaggaggtgtagtactgagtgagccagacgatgcccacgatggcgtagatgaactcgatcaccaggatggctgcaaggagagcaggcctggctgaaggatggctgccacttgcatgccagggaagggcctagaaccccggcctggcctttcctatcgctgggctttcagccagctcagtagcaaaggcagaggcagcgggccattagcagaccccccaccccccgcctcccaggccccaagcccgtcctgtcaccatttggtcctgttggcccctgaatgaccgcttgcaatgtgcccaccacctctcctagcttctgtgctctcaagtccccggggcatccctgatggagttttgctcttgttgtccaggctggagtgcaatggtgtgatcttgactcactgcaacctctgcctcctgggttcaagagattctcctgcttcagtccctagggtagatgggattacacgcacccaccaccaggcccagctaatttttgtatttttagtagagacggggtttcgtcatgttggccaggctggtcttgaactcctgacctcaagtggtccacccgcctcggcctcccaaagtgctgggattacaggcatgagccaccgcgcctggcccatttcctcattctatcaggatctcagaatcatgtctgaactgtggaatcagacacatcttaggcaagtttcctaatctctctgagcctccatttcctcatctgtaaaatgggagtgacaacatttatgtcataggactgtgcaaaaattagatgagagcgtgttcacttcatggaaactatttcccagcaagaggcctctggaacctgatggaggagagaggaagggcccagcagctggtctgcatccagctcaggcccctcaggggctgagactggaggggaggggtatggagtggtggctgagaaggagatctgctggcctcatgggggcagcctggaaagccccagctgcacgggcagcagtgtggcagctcagagaccagactttggagccagacagcgtgggttcaaatcccagctccgacatttacacgcttactagttgtgtgagagctaggcctgggccccagtttcctcatctataaacggagaccaataacacccactccctgtgagttaacacaggaaaaagggcctagcccagtgcacagaagcacaagagcagtgttcactacaaatgaccagaaggggctgcaacctaagcccaagaagaggacacaggctggtcctctggggagctggcccagactcctgagggggttcccaggaagcagaaggcctgttttgagaaggatcacaaggaagatatgctttgaagagatgcacatggttgaggatggggtcagcaccttttcctgtaaagggccagagagcaaatatcttggactctgggagtcctacagtcgctgtagtaactactcaactcggctgctgtaggggcaaagcagctggagacaataccttactgaatggatatgtgccaataaaaccttattttctttttttttgagatggagacttgctctgtcacccaggctggagtgcagtggcgcaatctcggctcactgcaacctctgcctcctgggttcaagtgattctcctgcgtcagcctcccaagtagctgggattacaggcgtgtgccaccacacctggctaatttttgtatttttagtagagacggggtttccccatgttcgccaggctggtctcgaactcctgaccttgtgatccacctgcctcggcctcccaaagtgctgggattacaggcatgagccaccacacccagcctaaaaccttatttaataacacatacagcaggctggatttggccctcaggctgcagtttgctggcccctagtctagaatgtaagctacagaaggccttagttcactgctgtaccccagtgctaaaacagggcctggctcgcaacatgtgcgcagtaaatactggctgagtgaatggagaggtgggagttgtctggggcagcaccccagggtgggtggcccttacccaggcgcacgtagagcacgtactgcatggagtcacggggctccgtgtagaggatgcccccgcgcatgctcagccagatgatggccatctcagcgatcatgcagctcagcaggatgcccaggtagccgcggccgtggtccaccaggttcagggagcaggcctcgtgcgggttatagaccaggccgaagagcaccacggacaggatcacaaacctgtcacaggaacgcccgtgtgagcaaggccaggtggcccctgtacctcgagatgctactagcaggcaggcccttccccagcccagattcagtggaaggagggctggcagcaggcacctcctccataagaccattgtccacctggcatcgaatgcctagaagggcatgggcggccagtaaaagactcagggtcagccatggggagacagtagcagcaactccccccagtgttggggtcaggtccagcaatggtagcaggggtgtcattgccctaaggggctagatgtttcaggcacctcctccgggcagctgggggcatgacagggttgggacttgggcccaagcagggaggaacaaatggccagaaagcgtccttccagacctttctctccaaacccaggcctgtggccccgggcctggggactcaccaggtggtatgcaggagaaagaggaagatggccggtaggacgaggtcatcactgcccacagaccagcgccgccggaacaccacgatcccgggcatggctggtggctctgcagaggctcagtgggcctggtgctcacctcctgaaagaaagcagaggaccttatagctgcctgaggaggtgaaggcacccagggccactgcattccttgggccacgggaccagtccccggtgtggccagaagcacaggcatttttggagctggccactggaagtgctgacccacctccgggcaggagccaacacaaaggaccttagcagcaggacacagacttcagccttccccctggagtctctcctgtcccccgagactggtactggccactagggatcggcttctacctggggttaccccagcagtcactgttgagctctattaaagaccccgtttcctccttcatgggatcagtgggaccctcagcccagccctcaaaccctataatctttagacctggcccagtgcacactgtccttggagtcaagggaggggcttcccagaccaagaacaagcccacccaacagcacaaagcccagcagggcaggaggaaggctgaaggccttgggaaggtgggggcaagggaccctgtatggttggcagctgggactgacaaacatggaaggtgaggagtgcctggcatagagcaggtgctcagtaagtatttcttgaatgaaggcttcagtttcctgctttgctggaagccaagagcgtgctctatgacttggttttgaacccatcagacagaagtccccaccacagctatgcctccagggagggaagagcacggttgaggtgcagggtcaggagtagggcttgggacaccttccaccccacactgctggaaggatggggtaagccctgcagggtcacacccctcctggcaaccatacctcccaagcccaccctgagccatgcagcttttccagctggattttcaactctctgaagtagctgaattcaaatcagccccaagcaagctcaggaaagagtgcccaggaactcagggccctcactccttagcatcccaaagagaaaggaagcagcatgggtgggaggtgaccccacagggagctaggtccccagagatacccataaagggctccagggtagctctgcactaaactgctgcagggggctggggaccaagttggtgggcagctgtcccccgccgggggccagtagaggcttacatggcacctggtccggggcaggcggcagatcctcctctccccagtggcggctccagggaaaatgtgtgtccgaggagcccggcatcattcggggaggaagcagccaagtctcccttggccagtgggcatagcccccagggtgggcgagagggcgtggggccaggtggccagcccgcatgtccgcccggcccgcctccctatccccggtgcagccacttggcgagctgtggcctggcgggctggcgggctagcctgccggggtcgtgcctactcctccccccaccctcaggaagtgacatcatcccactctctctccaaggaggagtcggagctcagcttctgggaggcagggagaagggtggagagtgagggagcatggtggtggggtggctgggctttgggggtggggggtggtctgtggactgcaggggtccggggcgtcagcagtgcctgtgacatgtggctgacagcaccagcttcagattagggttggacacgataggacaggagggggggctggggcaccgtgggtggcagttgggctggggcagaacagagctgccaacagctggtattgccgccccctccctgtctccaagtagctcacagagggtaaggtgcagcgctgggtcgggctcagggggctgtcggggctgccaggagcccctcacatgaatggaacagaatgaaatggaatgaatctagaggctgggggggcagtacgcccccgcaggtgctgtagagccgcatcctgctctgatctggccagaccaggggaggagggagcagtgctgtcccagaggggctggctggagggctagggtctggccctacccagcctgcccccaggcctgcctctgccagcagccaagaatatctccttctcaggtccaccccatggatggcccctctcagtcaccctgggaggtccctcctctcactcccacccttggacccatggaacccaggatagctaacactcctcgagatcacacaccatccacccaacacacacactcactctgcactcccctcctctgcccgaacaatgcccgctcgcttcagctctcaggctggaaggagtgagccgaacctggccctgggccctgcagaggtgaggtggctgaaggactgtcaagacgctggagggatatgaccagtggtaaccactgcccccacctcagggtgaccagcctgaggccaattgccatggtcaacagcagtacctacctagagtatgaggcggggctcctgggggccgaccctgctgggtacccagtgacaggcctgcaccagtggccggcccaccaccatagaatccgaggcacagaggctgggacacaagtgccaggctggctggttttgaacctgggctctaccacgtacccactgtgtgacttattagtcgtgcctcagtttcctcaactgtaaaatgtcgatttgtaaaatgtcgattatccctacctcctaaagtcctggtgagaatcacatgagaggtctgcagaggctctagctgtcttagctggggcgggcgaggcggagggagtgcaaggaaccccttgctggaccagccacccctcccgcctgggctggtggaatctccggctggtcaccaacaagtcaaggtctggggtgggggtggcagggcctgtgctgcataagggttgggggtgggctgcaccactctccaggccaattcatacatctcttggggctatttttaagggccttgaatggtgccctttctctagagaccccggcccatcacaataagggcctgttcccctgctggggatgtgatttcatctggaggaaatgtctcaggagcggggagggcagaggctacttcctggtctggggctgccacaaagcacctcttctggctctcctcccctggggcatagggtcctcccctctaacagccacagtggggcgggggtaggcgctgcctgcccttcctatcccacaccagtggggcttccagggcaggcacggcataccttccagcaggggccacaggggcactgctgggggctcctcctgcctctggttggacccccagcacaggcaagtgtgaatggggtgccaggacccctctcacatggatggaatgacttaagcagcccaaggaagcctccttcttcccccacccacacagcccaattttcctgctggtgattcaggcccctggactaagtactaaccattctgggagttcctctttctaaaaatgcaaactctttttaaaaatgcatatgctgccccctactttaaaaaccttcctggctccccatggcctgcaggacaaagtccaagcccctcgggcggcagcgacaggcggtgcaacctcaggcatatgcctcgccctctctgaatccacgcattcccttatcacctgagcagaaagcgatcctggtgcagacagactccagcacagagcccaccctcagctgacaaatccttctggctggagaggctctccagcaccttcttacactgccacatccttctttctcgacaccccaaacatgctgctccccagaaacacatcactggaagggtccatgctttgcttactccagttctgatgggtgaaatccaactcatctctctaggtcagctaaaagtcacctcctctttgaagccctccctgacagccctcatgcaacccactctcctcctgggaaacaggctgctcccttatgggaaccctagaccccttcccccagcatggccctggtcacactgtgttacggttaacctgctgactccttgctgcccatccccaccccagctcaacagtccccggggccagggtctcacagtacccatcgccacacctctgggtgccagctgcagtgcctggctccagcacctcagtcccaccccatggcctcctcagcacagctcccctcccagtcacaagggctgagacagtggctccttccccctctgagctcacacccttcccttctggggaaacgtccctcccttcctgactgtcaggctgggttcccaccccagtgtcttccctgacagctcagggagaaccctctcccccccctctggctagatgaactgttctgggacctcagtttcttctcttgtaaaatggggctaacaacatccctctcaaggctgtggtcagaacagactggggtgatgtcactacaggactctgcacaggtcctgcacaccccaaggatctgctgatggctgctgttgcattagcagacacctgaggggctttgtggggacctcctgtgatgtgacctgtgactgggtgctggggtctggaaggtgctgctggtgcccagctggtcagaaagggctggagtgagcaaacagaagccctgaccgaggagcctgcccccaccatgagtgctccggtgctgctggtaaaagcaccccaggctgggcctcgccccctcgtcctaaggtaccctgtgggcttggccctgggagcagattttaaggagcagagtcccttggcagcaagactcccagcagatggggctccaagagctcccagggggatgggggggaagaaggtactggctcagccctctggagtgtccacagggaactggacaatgagcttgggaacccccgcgagtgccacctccagcccatgagatttcccatctggccagagatggctttggtcattggcctggggatgggatagaggttgtgcctgaaggaggggatgacagccaggtccagccatagggatccatctgacattagctgagcaccttctgtgtcccaagtcctggactaaccggcttcagtcctcacagcagtaacacagggtcgcagtgtcgctctcattccacagtgtgtgcaaggggtggttaagaccctgcactctaaaacaggctgcatctgagtcttggctctgccacttactggctgtgtgaccttggacaaggtacttaacctctctgtgcttcagtctcctcacttctaaaccagggataagaagagtacctacctccgaattatcaggagggttaaatcagtcaacacttcaaacagcgcctgtcatctggtaactgctcagcaaatgctgccactgccattactattactactgaagaatgagactgagatgcagagactgcctgacaccatccgaggatcaagaggccaggcaggcaggaggcgcaggtcattcctgctgccatccaaagcccacacctaacaaaggtcagagttaaaaggagtctcagaacagtcccactgtcccctttcatgggcgaggaaactgaggttcagaaagaacacagaggccctagctcttcccgtgatatccatcccagcagcgtcactgccaggtgctggacacacaacccaagcccccaagccagcctgctcccttctacctcactacataccccactcaaactccccagtgacaacagcattagtagcgtgtcaccacagggagcctgggctgagatcctctctttcacgatcttgaagatgcctaaccctcctagaagccagcaacatccacagaagctccctcacaggagataaacctgtagggaggcatcaaccatgtgcctacttcagtcacctgcggctggctctcctgcctccagcggtggagtccctgttgctctgcagcagctgtggtgacagagaggagactctcagacagatccagagagccaccttccctgggcccccattttactcctgcctctgggggctggtgatggggaccaggtccagccacatcctagagctgcctggtgctgaatgaagagcagtgtccccaggacagaaagtcccaacccctctaggccccagtaaatcaaaattgagggccgggaggatgagtccattgcacacatgtgagacataagggcccccacggttgctatatgtaaaactagcactggacgccacacttcctggttgccaaagtaaatgtggaaactggcaagtttgtaagggctctttttcgctctgcagggttttttgacccttggtgtcctgaagggagagcccaggactcccatttccatgacgaatgggattcctatgtgaaagggctttgaaattggaaggtggtccaaaatagtggagaggaactgatgcctactgcctgctatgctctcgtggtccatccgattttgaatgtgccttgttgggcactggagcttatctggtctgggggtgggcatctgatctgcgggactcagcacagtgaggctgggccccccagtggtgccccgcaggacactggtggcccgccccccagcagaggcgttgtgttcagaggctccaccccagctagggtgggctcaccagcaggtcgctgtctggcctcgctgggctggcagacaggtcctgctctctttagcacaggctttggtcgtggtgagattccagctgttcactgtggctgcaggactgtggtagcgagttaacctctctgcactggtgaaactgcaggctccaggatcctgggtagtgacagggacagaatgatctcagccacctataagttggggactgggctgcttcggttctcctaacatttatgaattgcctacaaggtctcggcgcacatctatgccctttacaaacatgaactcacctagtcctcataacagctctgtgaggtaggtactacccttccccttatttgacagatgagctgaagtgacttgcccacagccacacagcctaggcccagaacccaggtctttacctctgcatgctgtttctgagaagcaggattcagctaaatgcctgtttctgaactcaaaagctggctctaagcctcttcttacagactgaggagctctctgggtcttcatctagcttcagactcacaatcatgtgggatagcacgggacccattctgcagatgaggaaaactgagcccaggggaattccacggagcaggctgtggagtcgggagagagcaaggcactagaaacactatgtgtcatccacctccagcctcatcaggccacagggtattaccccaactttacagatgaagaaaccaaggctcagagaggcaaaatggtttgcacgaagatccctccacgaggacatcgcagagctgggatttcaagtagcttccttgaactacttgcaagaaaaaaataccctctctgcctgtcagtctgactccttattgtcacaaacacagagacagtaggacccacaggtcccaccccaggctcccggggctacagtaccttccccttcttcccagtggccgagaggctggcctctgaaagcacaggaggggagaggtgacaagggagacgacggagagaaagcacgtgtgggctgggggccacgtgcgccaccagcctgtacctgggtgtgtgcaacccaagttaggggcctgaaagctgtcgcttttcacacatcagctgcgctagagcagaaggcagagcggagcctgcccaggactggggccagatttcagcatgagataggtcctcacacgcccaggcctagggatgaaaacagtgtgccttgtgcagccaggggcaggagtgggaggccactgacatttgtcccctcctacccgccgcccagggtcttaggctaacaaacgcctttcccactctcccccaggatggcctggaaggaccagaggaggcacctcctccacccctcaccatgtgccagccacataaccatcctcactacaaccccaggggtgggtctagctgttcgcatgtcatggatcgggaaactgaggctccaagaatttaaagaagctagcaagtgagtgtccaagtcaggctctgaagccaggtctacctgctgtgttctctctgtgccctcctcgtgcttcttggccagagacccctcccctataaaacagcagtcagggagctgggcacagagttcagggaggaggacggaaagagaagctccagtgacttgggggcaatgccagcctgggccggacccagaaatagttccaacaattactcgatcgtgtttatttaaaaacaaactcttatatagcatttactacatgctggttactttaacaagcagttcacaaaaattacctcctttaatgtaatccttttaacaacctcttatgccctgtattatggatgaagaaatggaggcccagagaggctaaataagttgcccaaggccattcagctcttcagcggcagagccaggcctgaggttgcagggcctgtgctccaggcctctccccagaaggcttcaccagggctccatttattaccaaggctccagctactcgttctcacgctaattattttctactcatccacaatgagcagaatttgccatctgccaccagccctgctactgacaccagccaactccctgggaatcaattgaggcctttcgtttcctgctggttattttggaaagatggctggctgctggggagcgggaagtgagggccaggagggcagcagcacccttccctggcgaccaggctgggccctcctcctgcccccagccttcctctgacctctcttcccagggggattcacatcagagcccactcagtcctgtgctccgacaatgttttccaacagtggaaggagtcccccaggctctggccagaccaggtctggcttctggattcttccttggagattattcatttttctgaaactcagaacaagcccttgtcccacacgtccacatcccctctggagaggcccagacaggcgggttctgctggcctctgtgatgggtgcggccgggcagcctggatctccaagccctcacgcaaaggccgacaccgccccacactgggtggcaccaggctgttttctcctgcctgtctgtggggaagggtgtctgtggttttcgtcctttctacctgccccggtggtcttcttggtcagtcccctcatgccctaacacgtctttaccccactctcccgggaacgcgactctctcaaaggcagcgacttggagggggtggccatccaatgagctgaccgaggcctgccttctggccccagagcagggcagcccgaatttgaatcttagttccatcacttctagttgtctatgactgtcacttcactgagcgtcagtctcctcatctgtaagatggaataatgaaggtactcacttcatagtgagtgagtcatgaggagttaacgaaataacgcacataaagtgctcagctcttagaaaacaggagctgccatcattgtgatttagtaaccatgtctccccagtgtgcgcagaacctttacctcaccttgcatggcaggggcaataactctccgcgatctaagtcaatcttcccaaacagacaggtgagcaggctgacccacacctgccctcacccttccagcctgcataatcctctgacttgccttcttggaaagggagagctccaactcctaggagcccagcacggccgcactggcactgcctcctttaatccacaaccacccagggagaggggacccaacacccctgggacagcttgagccacagagttctcgcccaaggccacaagactctagaacactccaaagcctgagatcctgccaggatgccccgcatctatcagcttgcatgtttgagtttcagggtgtctcattgcaggccccttcccagctcaaacgcaggatgccctgagaggtagcggtcccccctccctttaagcccatctgcccttccagctttccactggccccaccctctgctcctccccccagagtcaccccctctcctaggagccacttgctgggacctcactccccagatggcccccctgccaggcagttcatcagctcccagcacgaatcccagcgctctggcttctcagaacttccttgagaggagactccgtctgggtgctggcaacgcctcagtgaagaattagtaccttccacttcattaggggccccctaatgaagctgttaatgatatgctaagtgggcacacctagcctgatgcctcccctcttggggcccccgcccccttgcccagcctaccctgagccctggtcctgctgcctcctctcctcaggctgtgggttggccctcggggtctggctggtgtgggtgcctgctgctcaaaggtggggaggcttcgtgggccacctccctaagctgcatggccatctagggcacaggctggccaactgggctattgggtttcccttcgactgtaccccgggcatctcggaagcaagcagggatcaagtgacttcgtaacaggagctctttccccaggggaagaggttctgcagagctctagtatgtgacaggaagggccaacatcccctgcccccacagagactggagagggaggtggcacctgccaccaccaatggcacacaggctgcagccccgtcccctccctctgtcaccctcctctccttctgtgctcaatgagggggatctcagtgctcttcagtgggtttccagaagccctcagggaccccagatgaggggaggtggccatagtgggcaggcttcagtgggcttgcaggcaatgtcaaccacagcagctttcagctgctctggatcacctgaggtcaggagttcgagaccagcctagccaacatggtgaaaccccgtctctacaaaaaattagcggggcgtggtggtgcatgcctgtaatcccagctacttgggaggctatggcaggataattgcttgaaccgggaggtggaggttgcagtgagcgaagattgcgacattgcactccagccagccttggcctcccaaaatagctctaggtgacagaactagactctgtctcaaaaaacaaacaaacaaacaaacaaacaaagtttgaaagccactaagcaggatatgctctcaggtccattctagtctggacttttagagttttacttgcagaatggccaaggagagagcctgggggctacatacaggtgcctgagctcacacaatgatcacagcatttcctcccctcgcctgagccaggagggcaaaaggggccacagaaaaaagtcactgacccagaagcttagagacctgggcctacagctgactattctgtccttcagacctccctatcccctcccatcaccccaggcagggcaaagctggacccaagcacaaggcctccaggaaggggcaggggctcagaaggcccctgctgccgggtggaggacaggactggacccggctttggtcccagtgccttgatttactcaaacggccacagagttgtgaccttcaatatacaacgcagccctctcctcgtctataaaataggatgaggatgatgacagtgcctccctcttggggtggctgggaggacaaagcgagttaaaagttgtaaagtgtgaggctgggcgtggtggctcacgcctgtagtcccagcactttgggaggccgaggcgggtggatcacgacgtcaggagatcgagaccatcctggctaacacggtgaaaccccatctctactaaaaaatacaaaaaaaattagctgggcatgatggcgggagcctgtagtcccagctactcgagaggctgaggcaggagaatggtgtgaacccagcaggcagagcttgcagtgcgccgaaatcacgccactgcactcaagcctgggcgacagagtgagactccatctcaaaaaaaaaaaaaagttgtaaagtgttgaaagcaggctctggctcagaggaggagattggtgacatagagctttaattaaatcaacccccaagtcgggcgcggtggctcacgcctgtaatcccaacactttgggaggcctaagcgggcggatgacttgaggccaggagatcgagaccagcctggccaacatggcgaaactccatctctactaaaaatacaaaaattagccaggcatggtggggggcacctgtagtcctagctacttgggaggctaaagcaggagaatcgcttgaaccagggaggcagaggttgcaatgagccgagactgcgtcactgcactccagcctgggcaatagagcaagactcagtctcaaaacaataaaataaataaataaataaataaatacataaataaattcccttctcaagagcctattatgactcctaaatgccctttaaataaaattaaaactcccaaccattagctataaagctctccaccaaccacacccctaccccgccctgcccagccctgccaccagcacccataccctccaccttgtctgactctgtccctgccggccgggcacgcccactcccagctcctgtctttccacctgctcagccactgagtgcgccccatgcccaggcatttcctcctctccagatggccccgcttgctttgggcactccgccccgacatggcctccacagcctgcgaggcctgctcagtgcctgtcccagctggccttcagccccagccctggcaaaccagcccacaaatgaccaggtaagcccgtgacccactttcctgcatgcttctggtgtgtctgcctcacctcctccattacactgtagttcccaagaagaccctggcctccatctgcctctctcccagcctgtgggggaataggccaggaggctctgggcaacatagagactggaaaggagaggggagaacaggcctccacgatgaggggaaccccatcaggcccctgacaagtgccagcctctgcctgcccatgcctgagcaaggccactgacccactctgttctgggtaggtaagtgcccatctgctcgacctctgaccccagaatttggcatcactttccttcccaagagactcgcccagccttgtcacgctgtcacttctgcggcctctgcttcccgacctgctcagggtgtggtgggaggtggagctggggccacatgctcggcacagcccctctggccccagtggcacttcactcccacttcacgaggacacggcagggagggggcgggagtttggcagggcttcatccctgtcaaccaggggctggtgccctcggcccccctaactatccgcagtggggaaaaggcaggctcccgctaacccctgctggcccaggggaggtcagtgaagctgctgtaactccaggggatgaacctttccgtgaaggagctgacggcaacgtctgagagagaccagcagtgctaatgggatgcccagctggggctgtcaagccagacaaggtcctggtgagaccggcagaggccaaggctcctgccaggcagaaagtggcacctcgtctcctccagggtttggggaggcaatctgataatgcctgcttcctcagcaggcccagtcctaggaagactctggggtgggggtggtggtaagggagtcagcgagagctaggggacctcggcggggtcagcctgcgtcacagctcatgctgactcctccaccttcagtggccgccggctgctataaataccactcctgtctctggatgttgtgggaggtgacctagaatcatgggctctgaggcctcctgggtgcaccccccgcctgttttagacagagcctgacgaccagaaaatcctcacaggttagagcccacccccaaccacgagcagggccctcggccagcagataaaaccccaacactgagggagatggcttccaaacctagagcttcctccaacttgcacctcgacatgttcatgggtggggtgcagacaccaggtccctgggagcagagccctggccagcccaagacccgaaagagacatggcacccagggccattggctcagcctgagacctgctgccattcattctcctccatgcccactgccctctggagcccagctcaagggtgaaggctccaaagccatttgatcctgagtcccttccccgcccccaacttctcagtcctacggttgtcctcgattcttgattcagcctggtttccaaacttgtcaccaccctggaagcctccctggggtgtactctacttcgaaaggggccctgttagactgttctgcagttgctcagatgagtccttgacgatttcattcttccatttggtagcacgcttctgagtgagcccttccctcctccagagatcccagacaggcccaggcctcaaaccccaggctgggctggcccaggagcaaggacaggaggtggtcctggcctcggcaggtgtgaagacaccaacacccacagatggccagggcttggttccagagtccctggtttagggcaggggcaggctctcagagtagaaaaggctggaaacagccctgagggtgggccctgggtggtgtgaacacaggtgaaatctggttaaagtcaagttagtgcatgcagccattctccatccatccacaaatcaccagagtgcctactatgtgccagggattgggtggatggtgacaaaagccgacatggtgccagcccttatggagcctgcagaccagaaggaaagaaacttcaagtgaaccttcacatacaacaaagaaaaatcctctgacacgtgctcaggcggggaggctgcctatagaactaggagctggagctgtttctgaaggactagcagagggaagcaaccacaggagagagcagcgcggaacaagcactggaggataccctcggcagcagggcctggatgtgaggacagtggaggcctggaggatggagaaaaggccagagtcaggccagcagagaggaggccaaagcaggcaggctggcagggccaggccctggactctgagcctgggaatgacaagccaaggtgggtgcgagggtgaagagaagtgggtggcccagatggaaattcagcagacaaaatggggacagacagggcaggtattaaggatgtttactgctcgctgtaacactggcgctgtcaaagacgaccccagctgtctggcccgtgcaattgggcgggcagagggggcactggatcccagaggaacgccttgagaacggaggcctggggctgcccatcccaccctcagagcaacagctccgggagtcagccctgggctctgtgaacacaggtgaagtctgtgtcctccccctccccccagtctcagctcagcccagtcccgagctcaggcgagcccgggcacggcaggtcaggatgtcagtccaggagtcccactcaggagcagtcagtgggctctgctcccaccgctgagggttcccaatcatgtgcttgagggggtttgaggcatttctcctgaacattcagctccccactcttcctgccatccgggcccgaccatgaataggactacgcagaggagctctcagagttaattcaacctactacaggaggggaatggaaagagggtctctgtatgccagtcatccactctcccaaccacatgttggggctcagaaaatggtaccccaaagtgaacgcctcacaaacagcctcagaagcaaagcttttctctgaacatctcctgccttcctgtctctatcccttactctcccgacacaaaccacagaaactagaattctcttccccacccctcactctccccagaggcaagccatagaaactagaattcctctttcccaaggcaggtcacagaaaccagaactcctttcccctaaagccacccataaaacctaaaagtattagccttctcctgcctttctgcgtaagagctggccataaagaaatcctttggtcgggcagggcacagtggctcacgcctgtaatcccagcactttgggaggctgaggcaggcagatcacctgaggtcaggagttcgagaccagcctggccaacatggtgaaaccccgtctctatcaaaaacataaaaaattagctgggcatggtggcacgcgcctgtaatcccagctgcttgggaggctgaggcaggagaatctgttgaacccgggagacagaggtgccatgagccgagatcgtgccattgcactccagcctgggtgacagagtgagactccatctcaaaaaaaaaaaaagaaagaaattctctgacctactttgtttgatagtagatcataagacccccactcagaatcctgccccataccctgaaggaaggaatgcagcacagagaggccaagaaggatctgagagcaggccttgctgggtttccccactcagtctgctcccatggggtcttactctttgtgtccaatcatagctcttcatagttgcccattcctcctcaaacttaagcataaaaatggagtttccctggatctttggatcttcattctgaaggctcccatgtcacgtaaaactttgattaaatacatttgttatgctttcctcttgttaacctgtcttttgttacaggagtgttgcctatgaccctcatgatggggagaaaagggatcaccccatagctgcacctacaatccattcatccatccatccatccatccatccatccatccatccatccatccattcctccatcctccatccacccactcaccatttccagtcattctacactgttcatcacacttagaaagccctctccctcttacgttggcctgccagccctgtggcctggcctctgcctgccctcaccagcctcccaggcaccctggccttctctctgttcttgcaacaggccaggcgtgccgaacgcctttgtcctcactcctcctctagcctggagagaaccccaaccccacccccacccccagagctttgcgtggctggctccctcctgtcattcagctcctagctcaaacatcccctcctgggacctgcctgccaaatcttaggtaccccaagcgcccccatcataggactcagttttcctatcagcacttctcaccatctaaagttctggtgaatgtgtttaccatctggctccctccaccagggtgtggcttctcaggggaggggtctcgcctgttttcttccttgccaggttccctgcactgagtaaaggtttggcaggttgggggagctcaccacgtccctgctgcctgaaagagaaaccatttcggagcacggcctgagaaggacagaaacaggagaacgtaggagccacagcagagctgcacccagaacccagggctcctgactcccagccctggcctctttccacaccatctgctggccatgcctgggatccaaagccctatcctgaactgcccacatatgcaacttcactggctaccaacgaccacgctgtgggcgaggcagggaggaaatgtggcatcttcattttactgatgaggcaactgtggcaggaaggggctgtgggtgatttgcctgtggtaatgcagtgagtggtcctgctactggagggctccctagcattgacaagcctggcttccctctacctccctatgcatctggggccgtgtgacttgcgtccacctctgtacagcatcctgtgggagggagggcgcacctccaggaaagagcacagaaagctacgttctcaggatgcagccaggagactgaagccctctcccaaccgggggcccggagggcacctcagccatggcctggctataagtgagaaggggaaggacctggggaaatgacttctcttctaagagactcagtgtcttcatctggaggatgagggggttgaccagatgatctctaatttccctaggatccacttttacccccatcccccaatgctcagtttataagggtctgcagcctctggctcaggaatataatcccacagaagactcggagccttaaggtgctatcatctttctcacccactttcttctgggccccaacattgtcctggaggtagagaggccaggaatttgcacaccatggcccagtgctttgatgatccccacttttgaaatctgtcagaactaagttcgaaacctaacatgttcagcttgtaattatcagagttaaagacagagagagagagaaagagagagagaacctaacatgggctagctgtgggggctcacacctgtaatcccaatgctttgggaggccgaggctggaggatcactgaggccaggagttcgaaactagtaagaacccatttttacaaaaaaaattttttttaatttagccagatgtggtggtgcatgcttatagtcccagctactcaggcagctgacgcaggagaattacttgaggccagaagtttgagaatagtttgggcaacatacggggaacctgtctttattaaaaaaaaaaaaatttatctgggcatggtggcacatgcctgtagtcctagctactcaggaggctgaagcaggaggatcacttgagctggggagttccaggctgctgtgagctgtgattgcaaaactacattgaagcctgggtgacagagcaaaaccctgtctctaaaaacaaaacaagaaaacctaaccccccactgactgccgctgtgtgacctcagcaggctcgggggtgagactcggtaaagggcaggttttcggggtcctcatccacccccttccctgtgacacagaactgccctttgccaacttccctcgaatgtgagaacaaacaagatatactgagggttccttagaggaaggcactagaacaagcctcagcaatactccttccctttaagcagagccttgggcccctgcgcgcacacatccccaccacatgggggctcatcgaatcccggctgctttcctcctccaggttcgtacaatccacgagaccagaggaagacagcaggtgcctgagacatgcccgagcctcggcagcttccctacctagagcagagggagaggcgggcagcaggcatgcagtagggctgggcctggcagcggagaggctggctcctagtccccatggcccctcagagcccagcctcctctctgctcttctggggccttggtaggacacatgagatcacgtctgggcggtgctcagggcgtctgagagagaaaaggcccaagggatggaggtgggattaattatgtattagcacgcttctttattagcacttctgtttactgcagggcacagtggaaaacacatggggcttggtgtcagagaatccaggctggacatggggcctggccattcaagaggtgtgggcaagtcacaacctctttgggccccggttccgggaaaaaggggatgaacaacatctgagcgatgctggagaaagcatgacacaaatcagatttcctcacctgtcagtgggattgcaagaacaccagcctcccagcatcgctcactgtgaggtggccaagtgcctggcccggggccacatgtgagtgacatgcagggggtctcgttgctggaggagcagggaggtgcagggtgaaaggcctgaggatcgggctattggcagtgccgttcaggctggcactctctgggtgtgtcccaggtgggtatgctgggccagctctccttaggcagatacccacagcagcaagagaaggaaggggctgtgcaggactgcagggagggaggcacccggctccttgcctggctaatgcaagcctctctttggggtcccagctgtgggagagaaagggctccctcttccctaggatgccagatccatcagcagctaattatctaatctgttccccttggcctgaggaccacgatcacaggctcaaggagtcactggccatgagctgaatctgacagaaaaggacgcttgcaggccacaccctcaggagggcaggtgttggggaggcaggtccagggcttccgcctccagggctggcccagaggctggagaagtccaagttcaagttcctggggctgactcatcagaaagagggtgaagagaaggtcagggcagggactggttgaatcaagacaggctctccttgcaggagggcctgcagacaggctgctgcagaaaaggaaggcgcagacgtgtccataaatactcccagattcagttatgtgctcctctgcctcctgccatacaaaagtctcactgatgcatcccgtcacccccacaacccaggaccagtgccccaacaggagggctctgggggcctctccagctccttactgacagttcggctgctgctgccgctgccctggcacgccaggcatgccaggcccaggcactgccaagtcacatgctctgcgcgggcgaggccgggcactgctggggcagccttggggatgcagggtggtgtggcattcgcaggcagtgtgggtctgcagaaaaacggagtgcccagaggcagccggccacctgcctgccaccctccccagccccaccctccttccaggggagaaatccttgggcaaacagtcagccaggtgtgagcagcacagctaatgcagggctgggaaaagcaaacacggagggcctccatgctgtgggcccgctgccctatggggtggcattcgggtggccctgcccacagctgccattggtgtccccagcactctgcctacagtatttggagggtcttccaggatgaatgctttggccttccctccactgtactccccggaggggcctgactgtgaggtgacagaagcagcgcagggaagaacaggcaaggcatgagtctgcaaagggtgaggcggacctaggcctggagtctctgctgggccacgccttggctgggtgacttggagcaagtcaaaggacctcagggccagggatgcccaccgcacatggcctttgtgaaggttaaatgggatgaggcccatgtgggaccactgagaaaggatttggcacagaagagggtctggatatgtgggtgctcagcttagtgccacctgtgggtgtggggtggagccagggcaggtcgcagtaggagaggcagtgccatggaggtctggcccacacactctcccagggcatgctcacctggctgatctgtgaccccctggccttagctccagggcagtaaggccaacaccagacttctggcctgtggctgcagggccagccaggagggaaggatggtccagttctattctaccagcaggggctgctgcgtctactggccccaaactcagggcagaattccccccaactgagaaaggcctgttcccccaatggctcccatccagggcttcagcttcaggctggcccccacccatacgcagccagaggaggccctgtctttctgagggtgcatagcatgtcctgctttctctgctctgctgtgcaccacagttgagcgtgctctgcaggcggtctgcatgcctctgtgcccttgcacagtctgttctctttgcccaaaaggccttttccaatcctgctcccctgggaactcctcagtgttccaaagctcagcctaaacacaacctcctctgtgaagctgccagggcccgccaacccccaagggcagacctaatcagtgccccctccattccgggctccccactgggctgggagctccaggagggcagggctacactctgcatctctgtgtccttggcacccagcaccacgcctggtgcctagcagctgctcaagaaatgtcagacaaggcccccgggccagctcccttgctcctctcagatcatgctgccggcacatttggccaaagagactcagagatggcatgtgggaagcagggtaagagtgagcttccccagggaagcaggtggggtacgaggtttcctttcctttggaaactgtccgtgctacgtgcaccaagcttcacccactatcagaagtggctctggaggcttgcaggctgcctccccatctccaaaagcagaaaccaaagttagcaggggggtgagcaaaggaaagggaagtgcaccggaactgcagagagaaaggcagttgtggctgccatctgctgtgagcaagatgtttggagaacatgcgctcctcattctgaggtctcccagccaacttgcagagagctgggccgcccctctgcagatgggagcctgcagctcagccaagctgcagaggcaccacaggagagatgtcagggaccctgcctgcctgccctgaccctctggctggcccagtctgaccttctgattcttgagcagactgggggccaggatgccagcccaggacaagagtcacactgccttttccagggagcccccaacaggctctgagaaggcaactccacaataaggctgatgataatgtaaacataagggtgataagggcagtagtaccagccattgctcactgagagcccaactagctgccagaagacctggtactgggaacttccagtcattatctcactttgccccatgactcccaggggaggaggaaatggagggtccaagaaagggccctggcactgctcctcactgcagagacacctggctacccagggccatcacaggaggaaattagctgggcatggcagggcatgcctgtagtcccagctgcttgggaggctgagatgggaggatcacttgagcccaggaattcgaggctgcagtgagtgcactgagctatgattgtaccacggcactccaggctgggtgacagagcaagaccctgtctaaaaaataaaaaaataataaaaataaaaaaaaacaggagaatatctgagtgggaaggaacctctgagccactgagtcacaaatgctcatttgagggaggaaggtgaggaaggatgtagacagctgccccaggccacatcgaggtcagcagcaggctgggagcagaacctggaaccctgccccacagcccaggctcctggggccttggtgtgctcctgcgcaggaatggctgctgtcctcctgtccttggcaccacctggggctcagccacgtgtggccattcccccaagcagagcgatgcatttccgaggactgaggtaatgctggccttgcctggagggcccatctcagtttaggccaggccttccctcgccctggcccggcttctatgctcctgaccacagcagcgggccaagctcaggaggctgggtagggttgggcctaccaaccacattcctttccagggccaccttaccctggggctacccacaaaggaatttgcacagccaacagcctcatcagagtcactggagctgtccatggcactggggcacagaaaccgcttcatttctcactggccaggtgagcaggtagggggctgagaagtctgcctgccaagaccgaaccatgccagggtcctgaatgtcgccctgtgccctcagccctggcaggccagtccccagaggctaccatcccctgctatgccatcccagggaggtcatgggtgacctccctccccttggcgataggaaggtgaggatcttggggcaaaccacccagatccacacctcccatcccaccccacgcagctctgctgccactgcccccacaggccagctcacaagccgcacactccacatttctgtctgctcagtcctcccccagccccctacacacggtaattgcaacacctccaccccactgacagtgcctgccgctgcctgctcgctgccaaggaggctgggatggcccaaagatgtgcttcacgcaaaccttgctaggggaagggactacagttttccccttttctccaaggggtctttggatccgggtgctgaccccacttcctgcctctcacagctccccaccccaccccaccccacccccaaccccgggtcgcccagtctgtgaaatgcctcttactctgggagggatggagggaatcaatggcttccctattctcctgcctctcccacaggggaaggggaggggaggcatgtggcccctggagggatctttcagggagcgccccggccccactgctcctccccgctgggaagtgggggtggtgtccttgacggacggacggctgggcgtcaggtccactgggagtggaaggcaggcagccagggtagtgggcacctccacccccactctcccgctcccaggactccatgggaatcgctgtcactatccagacaccttcacagagaactcatgcctaggctgaggcacagccaggccgagggtgagtcagccagggaaatcccggcactggcgcccaccgctggtgacggttccgctgacacctacggaacggggtgcccagcccctcccgcagagggtgagaggaacacccaggctcccccactctcatttcctgctccctgagagcaagcctggtggtggggacagggaggagtctcagtgggggcggagtcctggagcgaggcctccgcaggctgccgtctttgggcctctggtccctcacccttgaacatcagcggggaaggaggtgggagaacggtcaccacagcccctgggctctggcccggagcctgtcatccacactctgggtatctggctttccagggtctcaccggggcacgcagggatgcacaccctacctcattcctgaagggccctgcccctgccctccttccaggcaaggccactgctctgcctgagcccagcacccccactatatgctgtcctggaccccaaaaaggcaagatagagagcagacttaagccagaagtcagtaccctccctgggatgaaagagagagaggaggagcaaagaggagccaagaagaacagaaagccaggcacaaagcctccttacagcaggacattctgtccctggagaagcgcctgtggccaggtccccacaaactcgccagaccagttggctggagcggggtgggaggctcagaccagggccagagagtggacctaggacctgaaagctcccagacaagaagctcccactgctcctccccgctgggaagtgggagtgggttggactcagcaggcccttaggcaggagcttctggggacatgaactcgaggatgccaagccctatcctcaagtagctcacagtgcagaataacaaggaaaccggggcgggtcagtgagcacagagctccgacactgatgcctggaccactgctcagccccaggcagacagaga

SEQ ID NO: 282 - DNA, 1364 bp, Homo sapiens
  Genbank Accession No. AF000959
aggggactggggccaagagccgggagcgcgggcgcaaaggcaccagggcccgcccagggcgccgcgcagcacggccttgggggttctgcgggccttcgggtgcgcgtctcgcctctagccatggggtccgcagcgttggagatcctgggcctggtgctgtgcctggtgggctgggggggtctgatcctggcgtgcgggctgcccatgtggcaggtgaccgccttcctggaccacaacatcgtgacggcgcagaccacctggaagggcctgtggatgtcgtgcgtggtgcagagcaccgggcacatgcagtgcaaagtgtacgactcggtgctggctctgagcaccgaggtgcaggcggcgcgggcgctcaccgtgagcgccgtgctgctggcgttcgttgcgctcttcgtgaccctggcgggcgcgcagtgcaccacctgcgtggccccgggcccggccaaggcgcgtgtggccctcacgggaggcgtgctctacctgttttgcgggctgctggcgctcgtgccactctgctggttcgccaacattgtcgtccgcgagttttacgacccgtctgtgcccgtgtcgcagaagtacgagctgggcgcagcgctgtacatcggctgggcggccaccgcgctgctcatggtaggcggctgcctcttgtgctgcggcgcctgggtctgcaccggccgtcccgacctcagcttccccgtgaagtactcagcgccgcggcggcccacggccaccggcgactacgacaagaagaactacgtctgagggcgctgggcacggccgggcccctcctgccagccacgcctgcgaggcgttggataagcctggggagccccgcatggaccgcggcttccgccgggtagcgcggcgcgcaggctcctcggaacgtccggctctgcgccccgacgcggctcctggatccgctcctgcctgcgcccgcagctgaccttctcctgccactagcccggccctgcccttaacagacggaatgaagtttccttttctgtgcgcggcgctgtttccataggcagagcgggtgtcagactgaggatttcgcttcccctccaagacgctgggggtcttggctgctgccttacttcccagaggctcctgctgacttcggaggggcggatgcagagcccggggcccccaccggaagatgtgtacagctggtctttactccatcggcaggcccgagcccagggaccagtgacttggcctggacctcccggtctcactccagcatctccccaggcaaggcttgtgggcaccggagcttgagagagggcgggagtgggaaggctaagaatctgcttagtaaatggtttgaactctcaaaaaaaaaaaaaaaa

SEQ ID NO: 283 - DNA, 145831 bp, Homo sapiens
  Genbank Accession No. AF001548
aagctttaagtgcagagcaagaaggaattgaaccttttattatgattccttgagcacctaactaggtgctagactaatgattacaacctgctaacacagaggagtgatttttgtttttaaattgagttaacttaatatatcaaaaaaagaaatctgtttctggcattgctcgaaaaagcagaggacctgacactgcagaatgcagagtgcgagtagcagtccctgtgagatgggctttttgctctgcttttccgcagacctcaccactccctgtcgtctcccaggccatggtaaccattgaccgtggcacctcttttgttcactcacacacgccctgcttcactcatgccttacctgctttgtctctgtagacagtgggaccctccaccctataccaaacctctggggttgggaaaatcatgatccagagccaaggtggatgggcccccctgctcattggaactccaagcccaagtccctgaaccatgaaccccaaaggacatttttccagttctggttctgcttctggaatgcccagggggtcaggagaagccctccttccaaactttagcaggtgacaatttttccgccttagagacctggcccagcaatcttagcctactctggaagcagtgtccacccggggacacaaggaacaagcagattgtgaacagaggcctcctgggtgccagccactgcactggtccctagagggtagaaagacactgtaactggaagctgccctttgtcaagccccaagcattagcccttctgatctttttttttttttaacatggagtctcgctctgtcacgcaggctggagagcagtggtgtgatcctggctcactgcaacctccatttcctgagttcaagcgattcttgtgcctcagcctcccagtagctgggattacaggcacatgccaccacgcccagctaatttttgtatttttagtagagaagtggtttcaccatgttggccaggttggtcttgaactcctgaactcagatgatcctcccacctccgcctcccaacgtgctgggattacaggcatgagccactgcacccagccttctgatctttcaagtcattattgcttcaaagaacctcctccagtaatacaaggataatctatgcaaagacctcaggagaatatttaaaaataagtatgtatcacaaaaagcagccctcttccctggaggcaaacatgattcacaggttcatgtatgtacacacacacacacacacacacacacacacacaccccaaacataagaaaaagtcactccttgtatgttttgcagtatgattttttttccacttaaccctaccttatagttttttctgtctgttcataactatctagtcagacttcaaatatgtttttgaataggtaagacatgcaaatatgaaataaaatagtgtataagggaatatagaacttcccccttcgttcctatttctcgcccttccagttccccttcttagagacactgtggttgctggttacatatgtagccctccagtcatgttatttatttatttatattatttttcgagatggagtctcactctctcacccagactggagtgaagtggcatgatcttggctcactgcaacagccccctcccaggttcaagcaattctcctccctcagcctcccaagtagctgagactacaggcgtgtactaccacacccagctgatttttgtatttttagtagagagggggttttgccatgttggccaggctggtctcgatctcctgacctcaggtgatccacctgcctcggcctgccaaggtgctgggattacaggcttaagccactgtgcccagcctattgctttttttgtgataaagtctcactctgtcacccaggctggagtgcaatggtgcgatctcggctcctgcaacctatgccttctggattcaagcgatcatcccgccccagcctcctgagtagctgggattacaggtgtgcatcaccacacccagataatttttgtattttttgtaaagatgggtttttgccatgttagccaggctggtcttgaactcctgacctcaagtgatccacccacctcagcctcccaaagtgctacaattacaggtgtgagctgctccatccagcctccagtgatgttttatacacatgcagccacatagagagcccctcctgcacccctccaaaatggcagcacaggccccggctgttgtgcgtctcaatctttgcatctaactgtgtattttggccattcatccatggtagtagagagagggccactgcacagtcttctgctatagggatgaaccataatgattaagcctgtctgctattgacaggtatttaggttgtttctagtctttttgctcttaaaagcaaggctgcagcaaaagcacgtgcttggtggaccacgtctgtctctaggttgggtatttagaaagccgtgatattgcactgcagcttcataaagaagccgtgattatccatcactttactgaggaagctcaggggtaggtctgtatgcacaagtcaggcaggtgataaggcaaagccaacactctgcccaggcctgtgtgtctttttttttttgagaccaagtctcgctgtatcacccaggctggagtggagtggcacaatctcagctcactgcaacctctgccacctgagttcaagcagttctcctgcctcagcttcccgagtagctgggattacaggcacgcgccaccacaccttgctaatttttgtatttttagtagagatgaggtttcactgtgttggccgggctggtctcgaactcttgacctcaggtgatccacccaccttggcctcccaaagtgccgggattacaggtgtgagccactgcgcccggccatccctgtgtgtctgaaagccagtgttccttccacttccctcccttccctccctgttcctcatttctgctgcaggccccgggagcaccccctgctcagggctctgtggctgaccatataaagcgtcagagaaaaactggagctgcttcctaatacggtcacaagagggaaatcctgggcctgcagctgggacttgctggtggcacagggcccatgagatgccggctgggacacaggaggctgggatgttgaaacctctgaatttaaccagctggagaggggctcgtggggccagagaggcagaaacacagccaactatggttgggctgggtcgaggtgaaggagaagtggctgaataatgtgggaggaagagcccgatgctgaagccccacgaccctgccgtgagatgtgcggctgcctgcaccagtcttaccttcactccatcgtcataccctggcttgcttagaaagcttttacagaactcagcagagattcagatctacctggaagtatggattaagtgcttgttgtgtgcacggcactgggagagatgtcccaaacaaagaggatggaagtcatattcctctttcagaagctagtgatggagttgaaaaggcagtgtggtccttccttctttttaaaaattcattttattctttttttttttttctttgagacagtctcactttgtcacccaggctggagtgtggtggcatgatctcggctcacataacctctgcctccttggttcaggtgactctcctgcctcagactcctgagtagctgggattacaggcatgcgccaccacacccagctaatttttgtatttttagtaaagacggggttttgccatgttagccaggctgttctcaaactcctgacctcaagtgatctgacctcctcgatttcccaaagtgctggcattaaaggtgtgagccaccatgcccggcctcttccttctttttaaaaattccttttattcttttcttttctctatctctcatctctctttcttcctttctttcttactttccttccttccttccttcttttttttttttttttagagtctcactctgttgcccaggctggagtgcagcaccatgatctcagctcactataacctccacctcctgggttcaagtgattctcctacctcggcctcccgactagctgggattacaggcgcctgccatcatgcctggctaatttttgtatttttagtagagacggggttttgccatgttggccaggctggtctcgaactcctgacctcaagtgatctgacctccttggccacccgaagtgctgggattacagctgactgagtgtctaccctgtccctggcactgtgcggggtgcaggagatacagtagtgtgtgggtcacagtccaggaggtaacatttaggcagagctctaaaagaggagagggaaccagctgtgggaagatgaggggaaaagtgttccaagtggagagaacagcatattgaaggctctaaggtggcaagacttccctctcgtgaaatgaagggagcatagtaagagtcactaaataacattgattgagcacctactacataccagccgccatgctaaatgcttttcgagcattatctcgcagcacatctatgaagggcttgttcgtatgcctccctgttttgtagatgaggataagtgagactcagagaggttaagggacttgcccagggtcacacagcgaagaagtagcaaagtgaaggttcaaattcaagtaccccatacccagttctgagcccttagccactgccctttactgcctccaggtcaagggcttgagtgaggacaggttgggctgtaaatgatacctacattcaaaaggggcgtggcagtggacatggccccagaggagctggagatggagtcgaggcctgaaggagggtggggcttgattgacctttgttcaggtgaccacagactgggctcttctctttgggaggcttgtcctggggacaggggacactgattgaacaggaaatagcccctggcctggctcagtgtagtccactgagtacctactgccgccgtgcaaggcccccaggtcacggaggtgaagtcaggctgtccctgctcccaggaagctgtatcattaatttattcccctggcatgcatttagcaagcatttagttagcacctattctataccaaggcctgtgctgggactgaagaggagaaagggggttccccggactcaaggcacttgcagctggtgtttgcaggatgggtgggagggtcctgggtgatggaatggggaagaggggtgtccaggcaggcagccccccactcccagccccaccaggctggatgttgctcctgggccccgcttacctctaacccttgctttgcttctccatttcggtccgatggagccgcttataccaagctgcttatagttcacccccacggaccccgtgtcctgtttttctgcccatgtccctgctttgtcttgagctggttaacaccttgttgtcctttaagactcagtgcagggaatacctccccacctggaggtttccctgaccacccccaatgtgggttagggccttcccttccttgttcctatcattctctgttcttacgacgtgttttaatgtacttgtctccccctctgatttaagttctttaagggcaggagctatcattgatttctttatctccagcctctgacacagatgtggtatatagtaggtgctcagtaaatggttgatggctatttagacaggcatatgttgactcattcattctccttttaggggatggtgagaacctccgtctccatcaatcctgtttccttttttttttttttttttttttttttgagatgggttctccctctgtcacccaggctggagtgcaatggcaccaccttggctcactacaacctccctccacctcccaggttcaagtgattctcctgcctcagcctgccgagtagctgggactacaggcatgtgccaccatgccctgctaattttttgtatttttggtagaaacagggtctcactgtgttgcctaggttggtcttgaactcctgagtgtgagcaatctgccctccttggtctcccaaagtactgggatcataggtgtgaaccactgcgcccaacaatcctgtaccttcaaagaatattcctctgcagcacccccagacattacataccattgtccctgagtggactgagccctggaaggaccttcccactctctctttttctttctttttcttttttgagacaaggtctcaccgtgtcacacaggctggagtgcatggcacaatcacggcttactgcaacctcaacctcccaggcttaagcaaacctcccacctcagcctcccaagtggctgggactacaggtgaatgccaccatgcccagctaatttttaaatttcttatagagatgggggtctcactgtgctgcccaagctggtctcagacttctgggctcaagcaatcttcctgccttgacctcccaaagtgctgggattacagttgtgagccaccacacccagccagactttcccactctctaattggctccagcccttgactaaaaggcccttgagggctgggatcctgtgtttttttaatgttctaatgtagtcccagcaccttttgcatggcatctgggacgtacagaatgaatgaatgaatgaatgaatgaatgaatgaatgaacgaacgatcagtagtttctgtttctgttggatgggcctaggctggatagcataatggaccatgctcatacctgggggcgggccaggctgggcttggtgctgccaggatcttctttggtgacctcggtcaagtcacttaaccctctgttgcttggttcaccctagctgtaactgagagatggatctgtggttctccctaagtcacttgcagggaagaggatacgctttatggccatcagagtcttgggcagtactgatgtttatcgtttggggaaagcagttcctgtgagacgggttggagcctgtctcctgaactgtgacctcaaccatgggaaaatctagtatccagtaaggaaaaatcatgacaatagtgccttaccacgtacagcatggcgggactcgccttgtgccttgactcctccgtccctgatctgattattttcagatgctcctattcacccagtaggagaggactgctattttttaaatggtaaagtgcatatgacataaaatttaccattttaaacattttaaagaaaacagtgccattaagtgcattcacaatgttgtacagctatcaatttcaagacagggtcttgctctgtcacccaggggctagagtgcaatggtacaatcatagctcactattaccttgagctcctgggatcaagcaatcctcctgactcagcctcccaagtagctgggactacaggtgatcaccaccatggccagctattttttttttttttttttttttgtagagagggggtccggctgttgttgcctgagctggtctcaaacacttagcctgaagcaatcctcccaccttggcctcccaaagtgctgggattacaggcatgagccactacacttggccccagagcatttttatagcctcaaaaggaaaccttatacccatgagcagttcctcctcatttcccacctctttccagcctctgggaaccacaagtctgttttctgtctccatggctttgcctactctagacacttcacataaatgagatgatagagtacgtgacttttcgtgcctggcttctttcactaggcatattttcaagcttcatccacattggagagctcatgtcagtgttggtctctgttttgcagatggggaaggtattaatgatcaggagcaggcgctgtggggtaaacaggagttctagttcccaacttccctccagctgtgtaacctggtgacaacctcaccatgcctcactttgccctcctgtcaaacaggcggtggggaaatcactgttactgagtagttgtgaagatgccacgaggagatgcctctgccatcttctagagactgagtcactggggtttcttcttagatatggacattgggaggtcccagaaagagatcagagggtggtgggaggagagagagcttggaggattattaccttttcctccctccctcctggaccacagttttggcagctgtgtttctgtatgactgcggatccctctggacagcccctttttaggggtgtgtggctttctatgcctccaatgttcagttaacgacattccctctctggctgagtgcggtggttcccacctgtaatcccagcactttgggaggctgagactggcgcatcacctcagctcaggagttcgagaccagcctgggcaatatggtgaaaccctgtctctacaaaaaacaaaataaaaattacctgggcatggttgtgcacacctgtggtaccacctacttgggaggctgaggcgagaggatcacttaagcccagaaactcaaggttgtagtgagccaagatcaccccactacactgcagcctgggcgacagagcaagaccctgtctcaaaaaaaaaaaaaagtaaacaacattctcttctgttcttgctcttcagacttaactgctcccgtcactggttgggtttctttaattctgcacacatatctgtaaacactttctttattaaatgttcctgagttaatatcttaagcacactgttcattttctgtgccacctgttaaatgatgagcatttaatatgattgtcagcatccaaaaaagatcctgcgtagtgcttagttcggtgcccaacacatagtaagtgctcaatgaacggtggctgttatttaagccagtgaggtccggggaggtaaagtggcaggtcggaggagtggagctgagatttgaacccagagctcttcaaaactccacagtttggccaggtgcaatggctcacaactataatcccagtgctttgggaggctgaaatgagagaattgcttgagcccaggaatttgagaccagcctgagcaacacagtgaaacccatgtctctacagaaaatataaacatcagccaggcctggtggcgcccgcctgtagtcctggctactcaggaggctgaggtaggaggatcacctgagtccagaaaggtcaaggtttcagtgagtcacgttcacaccaccgcactccagcctaggtgacagagtgagaccccatctcaaaacaaacacaaaaccccccacagttgcaaaataaaacataggcagcttggaaacccactctcgccctttctcctcttcccacgtacctggaatatcagtgaggcccagggtttccactaagactccaagctccagtttccccatctctaacatgagaatattgagtgcttctgtgcaatctgtctaccctggaggaggtctggaagtaagctgggttctctgtctgcagacgtactctggcctcttctgcgtggtggtcaacccctataaacacctgcccatctactcggagaagatcgtcgacatgtacaagggcaagaagaggcacgagatgccgcctcacatctacgccatcgcagacacggcctaccggagcatgcttcaaggtgagtgaactcagggctgcacggggccagctccagggagcccctcctgtcctgcttgtctgcagttcttgccaggaatgtggagtttggcaggcactgcgagggaccaggagttactgtggctgaaaaagggaaaaagcaaaaggaacatctgtgtttgcagcctgggagggtgagggagagccaagagcttgggcaaatacgggcatgggcccgctccagctccagctccggggctcgctgcccaaggtccccgtcgggccagctgtctgcaaaggatggaaagagggtggggaacagccctggggctgagccattgtggtctgtgttgacacctacctgtccctcaacccctgtgggactgtgggtaaatatcttttcctcttcagcctcagtttcctcatttgtcaaaaggggtgatagtctctatcttgtagcttcttgtgaagattgttaatgctggtttttccaaacttaagacttgtgcctattactttcatgtttatacgttattatttttactattgttttattatttttgagacagggtctcactttctcgcccaggctgaagtgcagtggtgccatctcggctccctgcaacctccgcctcctgggctcaagcaattctcctgcctcagcctcccaagtagctgggactataggtgtggactgtcatgtcaagctaattttaaaaaggtgggtttttttgttttgtttttgttttgttttgttttgtttttggaagtgacaggatcttgctatactggttggtctcaaactcttggcctcaggcgatcctcccactttggcctcccaaagttctgggattataggcatgagccactgcacccaggccttctcaccttctatttagaacactttggagcccctgaaatagccacccccaagtcaaacagagggactaggcagttaatgcaaacaagtgtaccaggtcaggcgaagagtacaagaaactcgaaaactcacaccccctctgaaagggcaccaacaggtgggaacccagggatctgagttgggagttgagaggagcccaattctggaagttcttgaggccggaatccaggtgtgcctgagagatgccacgaccccgcccccaagatagagggactcaggtataagtgccccaactttctgacagtgagccagactccacaggtaggaccagaatcttggcccttctaggcagggcctgccattacctccaaagaccagcaggtggagccttgcaaaggcaatcttggagctgtaatctcaggttgtaaagtgatggctcctggagtcaggtatctgtcttttttttttttttgagacggagtctcgctctgtcgcccaggccggactgcggactgcagtggcgcaatctcggctcactgcaagctccgcttcccgggttcacgccattctcctgcctcagcctcccgagtagctgggactacaggcgcccgccaccgcgcccggctaattttttgtatttttagtagagacggggtttcaccttgttagccaggatggtctcgatctcctgacctcatgatccacccgcctcggcctcccaaagtgctgggattacaggcataagccaccatacccagcaattcctggttcttttctggagctgaggtcccactaagcacattttaatctaaataccaaaaagaaagaaaattctgttagcaaaggagaaggagggggagcgacagatgggtaagcatttctacagtgctctgaaaaaatttatttgtaacttgaaaaagtctttaatattgtatattcattctagaaaaacttaaacatatatttaagtaaaagagaacttgctggcacctatgattctatcatccaaaactcatcaccattaacattttgttacgtgacctttcattacactaactgaactaaatggcatgaaatgaaggaaatttttactatctgaagataattcgttccagaaaaagatcacttaaaacagagaccaaagtttcactgtagatagtatgtgtgtggaggagggaaagagagtgggcaaaatatttgactgagcttgaaaaatgacattgcaggccaggcacagtggctcacgcctgtaatcctggcactttgggaagcccagatgggtggattgctcgaggtcatgagttcgagaccagcctgggcaatatggcgaaaccctgtctctacaaaaaatacaaaaattactttggtgtggtagcacatacctgtagtcccacttcttgggaggctgaggtgggaggatcgcttgagaccaggaagtggaggttgcagtgagccgagatcacgccactgcattccagcctgggtgagagagccagaccttgtctcaaaagaaaagaaaagaaaaccaacattgcaaattataaaaataggttaatttcagcttacatgtaataagaattttattttaattacaagtaggtgctaatttgtagattcagtataaaatgaattaagagtgggtgtggggtttttttctgtaactttttctgggctgagggatgaaatcatgtgagcataaaacgacatcttcatgtcatgcttgacttctgcagcccgagctaaaaaggatcattcttacagatttatttgatgggtcaccagttttcctaagggcttcttttacttctttagtgtttaagtctctcaaagcccctgtggtcttagcgttcattcagctgtgaattgccctgaatctttttctttcttttgtctttctttctttctttttttttttttttttccggatggagtttccctcttggtgcccaggttggagtgcaatggtgtgatctcagctcactgcaacctccacctcctgggttcaagcgattctactgcctcagcctcccaagtaactgggattataggcatgtgccaccacacccggctaattttgtatttttagtagagatggggtttcaccatgttacccaggatggtctcgatctcctgacattgtgatctgcccgcctcagcctcccatagtgctgggattacaggcatgcaccatcacaccaggctaattttgtatttttagtagagatggggctttaccatgttggtcagactggtcttgaactcctggcctcaggtgatcctcccacctcggcctcccaaagtggtgggattacaggtgtgcaccaccacacttggcccctgaatcttttttttggcctttccaaggccactgactttgccagtcactgcaccttgttttccagaactgccactttgttttgtgttcatatcatgatggtggctattgatacccaataattggcaaggtgaagccactgaatcgtcggagaaggaggtttcggtggagtttgatcgctcttgtagtcattgaagaatacttttgtgttgtggggacttttgctttcctagaccagcagtccccaacctttttgacaccagggaccagtttcatagaagtcagtttttccatggaccgcaggggagagatggttcgggatgattcgagcgcattacatttattgtgcactttatttctatgattacattgtcatatataatgaaatcattatacaactcaccatcatgtagaatcagtgggagccctgagcttgttttcctgcaactagacggtcccatctgggggtgatgggagacagtgacagatcatcaggcattagattctcataaggagcacacagcctggatccctcttatgtgcagttcacagtagggttggtggttctataagagtctaatgccgcctctgatctgagaggaagcagagctcaggcagtaattggagtgatagggagtggctgtaaatacagatgaagcccactactcacctcctgctgtgcagtaccagtcggtggtttgagatgcctgcgctagaccacctcttaactgtgaggcaatgttgtaattgacaaggacaccctgtgttcatatatttgattcctcatggtctctaggttttaacacaaaattgcatagtcagctctcttgaaactacttagaaatgctcacttgacacatagtaagctccaataggaaatgactatcatgattgagcacagcagcatgtcttcagtcctagcactttgggaggccaaggcaggaggatcacttgaggccaggagttagagaccagcctggccaacatagtgagctcttgtctctacaaaaaaataattagctggccacagtgcgtgagtctgtagtcctagctactctggaggctgaggcaggaggatggcttgagcccaggacttcaagaatgcagtgtgctatgatcgtgctatggtactccagccttggcaacagagtaagaccctgtcacgaaagaaagaaagaaaatgaaaaccgtgaatatgcacatccataaaagataaactctttacttaatttaaatgttaaccaacacctgctatgccctcgtctattttggcatgacctggtgctttctggcaaatcattgatggcggactccaaaaataaaaagaatcgggcacggtggctaacgcctgtaatcccagcactttgggaggccaaggtggggggatcatgagatcaggagatcgagaccatcctggctaacgtggtgaatctccgtctctactaaaaatacaaaaaaaactagccaggcacagtggcaggcgcctgtagtcccagctactcagggggtgctgaggcaggagaatggtgtgaacccaagaggcggagcttgcagtgagccgagatcacgccactgcactctagcctgggcaacaaagcgagactccatctcaaaataaataaataaataaaaaataaaaagaatgtcaaaaataatggagaaaaatttaagcttgggaagaattccgttcacctgcttaattttttctccattcccaagtaggaaattggtttttgtgaagaaacacgtaggcccagtgtgttgactccattgataaatggcacgatctcattctgttaagtcactgggctgcgatccacactaagcttaccatgaaggtggagagagaaagctagcacatgtggcttcttccttgagttcttcatggaaaagatggggtgtgaaaaggcgggattgaggagggatgggtaacacacatgcactgaatataagatgaagcattgcagttgtgtcacatagacagtaagttcctgaggacctataaactccatccttcttgcatgtgcatcattgtatctccagcacattttctggtgcctggcacatagtagctgctcagtatttgttgaatcaatgaattattagagttatttatagaaaagaacctaccagggtcaggatggatggggtgggttatttgagagaggtggggctttataagcctcgaagaatggtttgctaaggtgagagaagggggcagggatggctttctagccaagaataataaaagcataaatgtaggggtgagaatgggtatgatgagtgtggcaggagctggtttagaggggttgactagtatactgtggcagggagctcagagccagagctcagccctttgctgcctcacaggagttgggaaaatgggagggactttctaagagatacttcacaacatggcaccctcccaagtggaagccaagccccttgagggtatgggaagagaagctgatatttaaaatatgtatcttatatctgcatatgcataaattatgtcatgtttattttttaaattctccccccctttttttttgaggcagagtctcgccctgccacccaggctggagtgcagcagcacgatctcagctcagtggtatgatttctgctcactgcaacctctgtctcctgggttcaagcaattcttgtgcctcagcctcctgagtagctgggactacaggcacacaccaccatgcctggctaatttttgtatttttagtagagatggggttttgccatgttggccaggctggtttcaaactcctgacctcaggtgatctgcccgcctcaacctcccaaagtgctgagattacaggcatgagccactgcgcccggccgtggtttgtttttggaaagatgttacatacaaattcaaaaggtgaacttctcccttcaacccttgtgcattagacccttagcttccctcccaagagacaattatggtttctagtgtatgaggttttctcctagagatatttttgcaagtataagcaaataggtatctattttcttccctaagatttccctacaaatactagcattccatatatatacagtcctatattttgccagaggatgttacatatcagtgcatgtaggaattccttgttcccttttttaaaaaattggtttttatttttgttaaaagtattcatgcagacggcttagagtcaagtaatttttgaaggcttattaagaaaaatagccatcctctgctacttctcaactcctttaattgattttttttttttttggtatttaccaccatatctctgaaaacaacacttgatcattgtgctgctatcttaattttgttttcaattttaggtatcatctattgactttcctccatgaaagatgaaatttagctcattcaccctctggatttgcccctatttcctcgttccaacacacatgcctcatatcagagtcccagtataattttatcttagttttgacaaactcagtgttcagagtttccattattatgactatgtaatgctatctagagtttacattattatgattatgtagatgttattcaaagctgagctttgcactgctttgtgactatttttcttctttctgtatgacttttctttttcctggagttagcaattgccttttttttccccaatcttgttttccatgtatttaaccaccaattctgccccaaaatctctttctaaatgtgttaatctccttttaatatgtccagacatgtattggatatcatattgatatcatctccttgaatgtgatctctactatagccttctgatctgccctggctttctctatagctagtaactgtcatataggatctttttcaccatccttgaaattccccttagtgctttcatagtggattccttgtttcccagttttcatgtcttcctctttcttgctttactctcctgcttaaatcaagcactttgtccagtagcttcccaagaaagaatgtacgtgatcttgaggcattgagaacttccatatctgagaggcttgatgcttctctaacacttaaaggatagtttagttgggtttaaaatttcaggcaagaaagttgttttcagaaagttataaataactttttttgcctgagctttttaaggcatttgtgttgttgccttctagtttcagttttgagaagatgaaacccaatctgattcgtatgtgtgtatgtttgtgagtgtgtgtgtgtgtgattatattcaccttcctggctgggaatattcttgatcctttgtacatgaccagtttttgtttttcctccttctctagaagcttttagactgtctttgtacccctattcaggatgatgggacttgctatgagtccatttttatttgttatcctggacacttagtggcccaattaatctataaacgtgtgtccacaaattctgggaaatgttgcaaattatttcattgatgctgtctttctccctgtgttctctgtttctttttcttagaagtctttttatttccataatggaattcctagaccaatcctataatttaaatctctttcttttgtcattttcatcactttaatgtttttaatggtattttctgggcacttacctcaacttttttccctaacccttccattgcgttttaaatttctggtatatattttattaaattccaaaaattctattttatttttaaatgtttctttcatatgacattctttttctgtggttgcaatatcctgtttctcagaggatatttaatgcagagtctatttcctccaagatacatattttcctaattgttttaacttctgtctgtcatattagtggatttcttcagatgtcttgggattcttggctatccattcatcttggatgctttagtacacaggataccaaattgttgatggaagctcagtgcttataggatgggcttgctgatgtgcttggctataatatgaaagcactgggctaccccattaggacacttctgtttcgtctttcagtcttttgttcatgggctaatctgattcttcagagaaggtttgtagaaaaatcttctgcctggaggttaaagatttgtctagcatcattttgagggtctagttgaaaagaagctgagggtttcaaaatgtgcagtgaaatttgtacattataccttccttctttcagtatggttcctggtgtccccccaggacggagaccctctgtttaaccctcaccagagactaaacccaccaccttctgtggggtgtgagaagggcagtcacttggcttcagggagtgtagaagatatgggaggggtctaacagtgccttatatttgacccagtccttatgtttttgtctcctccttgatcttttcttccagaggcccctggcattgccagtttctgaggtttggggcagaaatggggaattcggtgttgaaattaggtcgtttcccacctttcctcactgctcacctagacttttttcttggtacctttttttttttttttttttttttttttttttgagatggagtttcactctcgttgtccaggctggagtgcaatggcatgatcttggctcactgcaacctccacctcccgggttcaagtgattctcctgcctcagcctcccaagtagctgggattacaggcatccgccaccacacccggctaatttttgtattttaaatagagatggggttcaaccatgttggtcaggctggtcttgaactcccgaccttaggtgatccacccaactcggcctcccaaagtgctgggattacaggcgtgagccacggtgtctggactttttcttggtacttttcaacgcttatcccattttctgtcttccaagatggctttgctgttctcccctctctagttctttttaaactgcctcatgtatttttacactttttggtttgtttgtttttttttgggggatggagtttccctcttgtcgcgcaagctggagtgcacgatctctgctcactgcagcctccacctcccaggatcaagcgattctgcagcctcagcctcctgagtagctgggattacaggtgcatgccaccatgcccagctaatttctgtatttttagtagagacgggttggccaggctcgtctcgagctcctgacctcaggtgatccactcacctcagcctcccaaagtgctgggattacaggcgtgaaccaccacgcccggcctttttacacttttttttttttgccttttcccccctcttttgtgtggagaatggggtcttgttatattttccaggcaggtcttgaactcctgggctccagctttcctcatgcctgtgccttcctaagagctgggattccaggcatgagccaccatgcccggctaaactggttcatgtatttttggaaagtcttttacagttattttagtaaggtttaggaaggaagagagctaaatgcatgcactcagcctaccatcttctcatgggaattctctcatgccttcttttacaaagaagtgataataataatcatggatttttattatatgcttcctataaagctcagggctttacagaaatattctcagttaatctttaccacaaacctacaaggtggacaggaccagattaggaattttaaaattaagccctgaaactattaaggtgcaggcatatgtcataaaaaaaaattaaattataaagtaaagaaggctgacaaaattgtttttgtttttgctttttttagagacagggtcttgctctgttgcccaggctggagtgtaatggtgcgattgtaactcactgcagcctcaaactcctgggttcagcaatcctgcctcagcttcccaagtagctgagactacagagatgtaccaccatgctcagctaattaaaaaaaaacaactgttttttgtttgtttgttttgagacagagtttcacccctgtcacccaggctggagtgcaatggcacgatctcagctcactgcaacctccacctcctgggttcaagtgattctcctgcctcagcctcctgagtagctgggattacaggcacatgccaccatgcccagctaatttttgtacttttagtagagatggtgtttcaccgtgttgaccagactggtcttgaactcctgacctcaggtgatccacccaccttggccttccaaagtgctgggattacaggcatgagccaccgtgcccagtcttttttatttttgagacaggttctcactttgtcacccaggctagagtgcagtggcacaaacacggctcactgcaggcttgacctcctaggctccagtgatcttctcacctcagctccccaagtagctgggactgcagccatgcaccaccacacccggctaatttttgtattttttgtggagacgggatttcaccatgttgcccaggctggtcttgaactcctgagctcaagtgatccacctgcctaggcttctcaaagtgctgggattacaggtgtgagcccactgtgcctagtgaaaaaactttttttttttttttttttttttttttttttagagataagatcttactgtgttgcccaggctggtctctcattcctggcctcaagtgatcctcctgccttgacctcccaaagtgctgggattatgggtatgagccaccgtgcccagcctaaagttgctatttttcccatgatgtttatcttcgtggtgcttatgaaatggcaactatggcattcttccttctcgtgcatgcctgtgtgggtgtgccctcagcatatgcttacaaggtttattgggtgatccaacgctagccgcaagagctattattagctcccttttacagctgggaaaacagactcagaggagtggagaacttgctgcagatttgttaagtgtcagagccaaatatacacttggattatcctgactccaaagccggagccctgctggtcagtcggtgacaccgggcaaccacagggatccccctcaatcccacggaaggctgtctactgtcttcatctcagagtgttgacagctcaaagcttaggaggctggagctaagttcaataaatgaacgtgatgaataggagaaaagcgccattaaagccctccagacaagaaccactttggagcccctccatgggtccctggggtgtaggaggggcaggaaagcagataagattccattctgagcctctgcacttgccctatgcaagatagccacaagtaatgttttgtcctcacctcattagcaacaaatggccacactcaggggattaaaaaaagaaataacagccagcctttatcagcttggggctcttggctaattcctctttaagcttaagacaactctgcgggtggagtgatccaaacgactttctccactttgcaagttcccacactcggctgtatccttctgcttgagattggcagccccctggggatggttcctgctcacccaactcccctgaggctgctccccagtagaggcagagagaggaagggcactgatgtcctcagggcccctgcaataggtcaggacctgggttcactgctccatcaatcccacattgctcggccctcactagcaccacacagggtgggtggcagcctccccatttgatcaatggggaaaactcagcacacctacttggccccagaactgagagtcaaacctggggacccagcttcgctgccctcagaatgttactcttccctcctgggtagcgtggtatagatagtgtagtattcttgtccccatataacggaagaggaaactgaggcccccagaaggctaagggactagcataggccttgtgtcttagcctgttaaggctgctatatcaaaataccatagactgggtggcttttaaacagatatttgtttctcgtggttctggaggctgggaagtccaagatcaagcttggtatctggtgagggcctagtgctgccttctcgctgtgtctcacatggtggaagggacctgctagctctctgggtctctcccccaatgaggattgaacccccatgatctcatcacctcccaaaggccccacctcctaatatcatcactttaggggtaaggattccagcatatgaatttgagggagacatgagcattcagaccatgacaccttgtaatcagaaaggggttaaatatctttggttgaatatcctgtcctgccgattcagaatcactgctgtctataacctcttccctagatcactgttttagatgatgatgataaagatgatattaacggcaattaccaagctcttaaatgtgctgtgggtaaaacaattttaagctctttctgaatccagtctctttcaatcatcttcatgcccttgaaaggtctggatttttgtcgatttccctggtgaggaaacgggccctgggggcagaggtgatagggtggagccaagaagtaattcccagctgtttctctgcagaggcagtgctgctacaaacacatctccaggaaggggtacagccaaatgcttctctgtctcttgtgggttttgcagtggctgtcagctatgtgtctggcccggttgggaatgatgggggactgtgtgtgggaatgaatggctctgtctggctggctcagtctttacagaggtgctaggagtgtctgtttggtgctctgactaatcatgaaaagttcacgtttttatctttattttatttttatttttggtacccatggtgcattacagggaagggagacagcaaaggagaattatttgttataaaatagtaaatattggccaggcacagtggttcacacctgtaatctcagcactttgggaggcagaggcaggcagatcatctgaggtcaggagttcgagaccagcctggccaatgtagtgaaaccccatctctactaaaaatacaaaaaattagccaggcatggtggtgggcgactataatcccagctactcgggaggctgaggcaggagaatcgcttgaacctgggaggtagaggttgcagtgagccgagattgccccactgcactccagcctgggcaacaagagcaaaactccgtctcaaaaaaaaacaaaaacaaaaacaaaaaccgtaaatattaaattgaaaaagggacatacttaagggagtgaacctgaaaagccccagctgacacttggcaacaccttccttgtttgttttgggcttttttgagacagagtctcactctgttgcccaggctggagtgtagtggtgtgatctcggctcacctgagcctcagcctctccaggctcaggtgatcctcccacctcagcctccagagtagctgcatacaggcatgcaccagtacaactggctaatttttgtattttttgtagagatgaggttttgctatgttgttcaggctggccttgaactcctgagcccaagcaatccacctacctcggcctcccaaagtgctgggattataggcgtgacccacagtgcctggccagcaccttccttgttaaattgcatgtgtcagccacctccctcggtgtcctcccagcctctgggcagtctggctccccattcctttctttatccaacagcatttttttgtgagacaaggccttgccctgttgcccaggctggagtggagtggcacactcatagctcactccagcctccaactcctgggctcaagtgatcctcccctctcagcctcccaagtagctgggaccacaggcacagatcatcacgcctggctaattttttgattttttgtagagatgaggtctcattatgttgcccaggctggtctcgaactcctggcctcaagcaatcctcccgcctcggtctcccaaagtgctggaattacagatgtgatccaccacgcccggtcattctaacaatattgattattagatgttgccctagacacagcctactgtgcgtatgtgtaaatacgaattgaatcatcccacaagtagctgctaagtagaggaggtccagagagtggggaagtgtagccctggggaccttgggaggacaggggaggcttccttggaaggtgaagtgtaggcttggctagggaacttgatataggttctatgaggctgctggggctggagcagagagaagggggagaatgtaggaggtaggagtggaggcccaagagggagagcgttggttttcctgtctcctacaccccttcactggccagttctgctttcatgtttttatttattatatattttttgagacagagtttcactctttcacccaagctagagcgcagtggcacaataatagctccctgtaacctcgaactcctaggctcaagcaattttcctgcctcagccttccaaatagctggggctacaggcacacacctctgtccacagctaattaaaaaaaatttttttttcatagagataggggtctcgctttgagtctcaaactcctcgcctcaagcaatccttctgcctcagcctcccaaagcactgggattacaggcatgagctcctatgcccagcccagttctgcttttacaataccagggcttcctgtaggtttggaaaacacctgttgggttgcagcaaaggctctcaaagtatctcttcttactcagcatgtcatcctaaccaactctgccgggagagtagagtggggagatgaaggctggagaaagagaagggccctcacttacagaatggcttaggtcatgggctctggagctgggttcacctcccagctctgccccggctattactttgtgcctcagtttcctcacttgtcccgtgaggatgatgactgtgcttactccagttgttacaagggtgattcggtcagtgtgtagggacacggtgcatggacaggacaagttcaacaggcattagcagtcagctgccgaggacccaccgtcaagggccatgcagtggccaccttcacagtcacaccacagaagatccagaacctctggcatctgcctccgtgcggggcattaggtagagagccacttttctgcaggcaatggaggctgagacctttcttctttactagcccaggggtattgatggccctgcagagacgggttttgattacctctcactggatcccccagcagcctgttaccagaaagaagggcagacgcagggagcctgggtctgtgctcagtccccgctgggttttctccttttatggtcagcctacagtgctctggcttcccagacagaatccaccagcttgtgtttgggcttgggccgaaatagctggtctgtggggagctgggtacctcctgggagtcctcaggcccacagcgggggaggaaccgctgaagccctttatcttctcaggaaacgtgcctggggccttacacatccgaggctgggtggggagtctggggaggaggaagggagagaggcatgtttaaggatggggtgtgaggtgacatgagccccagggatctgggctgggaagctcagccccaggcgggtcctgatgatggccggccgcccccagctccagccttcccagactccacggaggctcggtactgtgtccccgcccactttggagcttctgtcccaggccctctgcttgggatgctctgcctcgacctctccccaggagattctttcacatttttcttaatgctgttcagtggtcacctctgccgtgaaggcttcctgtcttgctcaggtcagtgtgaaaaaacaaacaaacaaaaaacctgacgtctatagcacttgggttcacatccatcgtagcactgctcatctcttacggtcatttctttgcccatctgactcccaccctgggtcatgaacttctcaaaagcaaggataagcaagtcatgaagctcggtgcattggcttgagcctgtgatttcagttacttgggaggccaaggcgggaggatcacttgaggccaggagtttgggaccagcctgggtaatattactaagttaccttactaggccctgtctctacaaaaaaaatgaaaacaaaaaacaaaaaaaccattagccaggcgtagtggcatgcacctgtagtcccagctgctcaggaggctgagatggaaggatctgttagcccaggagttccagactgcagttagctatgatcgtgctactgcacttcagcctgggcatcagagtgacacctcatctcttaaaaaagaaaagaaaaaaaaaagcagatcttattgacttttgtgctttcggtacctggctcaggactcgtttgttgaatgaatatgtgaacacgtgaatatgcattttccattgcttctaccttggttgcctctctgagccagagagcaattcaaaataacaagcatttcctgagcacctactgtgtgtcaggcattgttccttgtaccttcaggagctcattggttcaggggaaaagcattgaaaatgaacaattttgtaattgttggaaacctaatagagctgcatgaagtggaagaagtcagatttataatcattcagaggtggtataaaatgaacatcatttttaaaaaaggtttatgcggtataatttaaataaattcattttaaggatacagttcacacctaaaattgcagctatgtctgcataactgtctaaattcactcataatttacatggttatgcagccattgctgcaatataattttatatttctatcatcccccaaagaaatcttgtgcacatttttttgtcactccatattcctacccgcagctcctggcagccacgaattcacaaatctactttctgtctctatggatttgcctattctggacatttcatataaatggaatcatatgtgaccttttgtggctggcttcttttttttttttttttttttttttttttttttttttgagacagagtgtctcactgcactcgcccgggctggagtgcagtgatgtggtctcggctcaccacaaactctgcctcctgggttcaagtgattctcctgcctcagcctcccgagtagctgggactataggcacgtgccaccacacctggctaatttttgtatttttagtagagacggggtttcactgtattggccaggctggtcttgaactcctgacctcgtgatctgcccacctcagcctcccaaagtgctgggattacaggtgtgagccaccgtgcccagccggctagcttctttcacttagtataatgttgtcaaggttcatccacgttgtatcatggattcatactatttatatattttttaagacagggtctgtctctgtcaccccagctggagtaccgtggtgcagtcgtggcttactacaacctccacctcctgggctcaagccattgtcccacctcagcctcttgagtagctgagaccacagggattgtgccactatgcccagctaatgtttgcatttttttttgtagagatagggtttcaccatgttgcccaggctggtttcggactcccgggctcaagcaatccacctgcctcagcttcccaaagtgctggaatttcaggcatgagccatggccgccggccataacatcctttcttttcatggctgaatactatcccactgtctgggtagaccacattttgtttatccatctacccattgatgaacatttggttgtttctattttttggatattatgaataaagtccataatttttaccaatatggaaaagaaaaacaagaaaaactctgaatgccatatcatggatagatggcctattatcattccatatcatctgtacctttttccgccagaatgttttgagacatttattaagtaaggatcacaatgatgataattactaaaatggagagaacctgtggaccatgggaaccactaggccatgtgacactcatgtttatattagagaaaggcaccgttttctcaaagcacttttcctccatctgctgaaagattattacaataaatacacaatgcaatacaataaatgaccaatgcaaatagtttctccatagagttatgcagtgtacaacatgcaccacggtccatggccatcctgcaggtaggaggtcaagtggaaaggtctccaactcagctctagaaaagtgcagagttagagaaggtatcatagaagagttgactcccaagacgatgtttcagatacagattagggtatgtacccgaagaattgaaaaggtactcaaactaaaacttgtacaggaatgttcatagcagcactatgcagaatagccaaaaggtggaaataacccaaatgtccgtcaactgttgaatggataaacaaaatatgatccatccgtacaatgtgatatgactcagccacaaataggcataaagtctgggacctgctacaacatggatgaacttcagccacatgctgagtgaaagaagtcagacatgaaaggccgcacatgttataattccatttatgcaaaaatatctagaataggtaagaccatagagacagaaagcaaattggcggttgcaagggcttatgggggagtggctgcttaacgggtagagggtttcatttgggggtgacagaatattttagaactagataaaggtggtagttacgtaacattgtgaatgtactaaatgctcctgaattatgcactttagttatttttttatctttattactattttttgagatggagtctccctctgtcacccaggctggagtgcagtggcgcgatctcagctcactgcaaactccacctccctggttcacgcgattctcctgcctcagcctcctgagtagctgggattacaggtgtgcaccaccgcgcccagctaatttttgtatttttggtagagacggggttttgccgtgttggtctcaaactcccgactttaggagatccagctgtgtcggcctcccaaagtgctgggattacaggcataagccaccgcacctggcttgaattattcactttaaaatggttctttttatgtagtgtaaattttacctcaatggaaggaaaaaagagagagagagagagaatggattaggccagagaagaagtggtggtgggtgcactgggcagaagaaatcacttgtgcaaagcaaggagggagtgaaactgctttgtacggtggagaacactgcttttgagtccaacacaagctcaggcttggggaaggaatcagataaaaatttccaggatctcagagttccctgtgctccacacgggttggcagacagcacccacatggagtccttctgctcgtaaccagcaccctgcaagcttcccacgcctggaagtggtgtgtttttgatgggaacgtcaggccagaggtctcccagcagcccccagctcggagccgcgctggcagctcccaggccttctcctggagcccgctccctctcctgggggccctgtgagcatctgagcctataaatctctcctgctctgggcctaggattcacaaggctgccaggaaagcctgcctctctccctgaagtagtggatcaacacagcccatctgtctgtccatctcaaaatctttccttaagatagtggaggttgtctgggccggtcccaggaggttctctctgtctgggttctaatcacagggtacctggttcttctatccttcaccctcttttaaaaaatcactttttagtactttgggaggctgaggcgggcggatcacctgaggtcaggagttcgagaccagcctggccaacatggtgaaaccccgtctctacaaaaaatagaaaaattagccaggcgtggtggcacgcacctgtagtcccagctactcggggggccgaggtggaagaattgcttgaaaccaggaggcagaggttgcagtgagccaagatcgagccactgcactccagcctgggtgacagagcgagactccatttcagaaaaaaaaaaaaaattaaactggtttcccattttgctctgtcctcgagtgaatttctccccctgggtggaagctaaaggcacgggtatctgtctgtctccagagtataatggagagattaaagtttgattgcttttttcctgctttttttttctttgagatggggtcttgctctgttgcccaggctggagtgcagtggcaaaatctcaactcactgcaacctccacctcctgggttcaagtgattctcctgccttagcctcccgagtagctgggactacaggtgcctgccgccatgcctggctaattttttgtatttttagtagagatgggtttcaccatgttgcccaggctggtctcgaactcctgacctcaggtgatccacccacgtgctgggattacaggtgtgagccaccacgcccggcctcctttctcttataaatagggacaccattgatttaggtctcactccaagccaggatgacctcatctcaacatccttcccttaattacatctgcaagacccttattctaaataaaatcacaggtgggatacagtggctcacgcctgtaatcccagcactttgggaggctgaggcaggtgggtcacttgagcccaagagtgtgaaaccagcctgggcaacatagcaagacccaatctctacaaaaaatacaaaaattagccgggcatgctggcatgtgcctatagtcccagctacaggggaggccgaagagggaggattgcttgagcctgggaggttgaggttgcagtgagctgagatcacgccactgtacacccacctgggcgacaaagtgagaccccatctcaatcaattggttagtcaataacatcgcagtctgaggttctgagtgaacatagcttttgggagtcacagttcaacccaccctagtgaccttgggcaagttgcctcacttctgaacctcactctccttatttgtaaaatggaggcaatgccagtgcccaccccaggagctgctgagagaattcagtgggtcacttcaacacagaagttcagcatacgcctgcagtgcagtgagtgctcgggagatcggagctgttagtgggatcctaatgcggtggctctttcttttctgtctttttttagctttgtggtcatgatggtttcataaagaacaataccgactctttttctattgaccatttttggtgggatgaggaaaagattgtatgtgttcatagcacaaacataaccaggatagaagtagaatgggtgaaagtaggtcttcctcctgtcccttttctcaatacttcaggctcaggcctgtttgttggttttttttgtttgttttgttttgtttttggagtctcgctctgttgcccaggctggagtgtagtggcatgatctcacctcactgcaacctccacctcctgggttgaagtgattctcctgcctcagcctccggagtaccttggattacaggtgcatgctaccatgcccagctaatttttgtatttttagtagagacagcgtttcaccatgttggccaggctggtcttgaactcctgacctcaagtgatctgcccgcctcagccttccgaagtgctgggattacaagtgtgagccaccgcacccatcccaggtctgtttttagagatagggtctcactccattgcccaggctggagtgcagtggtgtaatcacagctcactgcaaccttgaactccttggctcaagggatcctactgtctcagcctcccaagtagctgggacaaggggtatgtctatcacacatagctaattaaaaaaaaatttttttttgtagagactgggtcttgctatgttgtccaggctggtctggaactcctggcctcaagtgatcctcccatctcagcctcccaaagtgttgagattacaggcatgaaccactgcatcctacctatatatctgtctttttaaaacacaaaaggtataacactatgctacctcatcttttatttttagcttaatatattttggatatttttctgtgtccatccacaaagctctgcctggttcttttcaatggctgcctattttatttatgtatttatatcttatttgtttttgaaacagagtcttgctctgttgcccagcctggcatgcagtggcacgatctcggctcactgcaacgtccgcctcctgagttcaagcaattttcctgcctcagccttctgagtagctgggattacaagcgtgtgccatgacacccaactaatttttgtatttttagtggagatggggtttcaccatgttagccaggctggtctggaactcctgaactcaagtgatccaccctccttggcctcccaaagtggtgagattacaggcatgagccactgcgcccggcctgcctatttttaaatgtgccattatataaacacaccagaattgaaaccccagagctgactagtctttaggccttttgtcttgaggatttcgttcaaccaggccacccaaacatccatctataatccgagggaagagagagagaactgattggagttgggcatagaatctgaggaacgtgcccacatccaatcagttctctcttaagattacagatggaagaaagagtcatctctttcaccttgccttcttcagtcccatccatcctcccattcatattcccatccatccatccatccatccatccatccatccatccatccatccaactcatttaccggcctatacactctgtcctccctcccattcacccacccatccactctctcatccactcactcatccttccctcctccgtccaaccatccgtccaaccagctatatacccacccatctacccatctacacacccttccctcctttcttctttctttcttcctatctatccatccatccttccttctttccatccatctattcgtccacctacccacccacccactcatccatttgtcttcctgtctctctacctgtccatctatccatccttccatccagccatctgtctgcctattcacccagcctcccatccatttatcctcccgtccatttacctatccatccattcttccatccacccatcctttcttccttccttctttcctttcttccttccttccactcacttgcccatccacctcttcttccatcctcccatccatctactcatctatccatccattttcccacccatctgcccatccacccacccacctactcacctactcatctgcttatccaccctcccgtccatctgtctattcatccacccacccacccatccatctacctacccatctacccacccttccattcacccatctacccttccttcctttcttccttccttccgtccactcatcttcccatccatctactcatccatccctcaatccatccatctaacaagcataattcagcacctaccatctatgtgccagtactagagatacaatgtaaaaccaagcctaggagatttttgatgaaatgaagcttgtgagagctgagcactgaactagtaggactgaagccagggagtggatttaagaaatgcttgccactgtggcattgtctaccagcagatatgatgctgggatttctacattgttaggtgaccattgaacgtattggtaactgttctcagatctctctttgggaaggaaatgggtcttcagagcctggctccacctcagaggcctctttaagagtagaaggtgatggataatgtctgcttaatcacatctagttctttgatgacctctgtatcttttgggtttctctggtggtaaacaagagagactgactctgtcatctagtagaggaaagggatttgtaggggagtatggaggagctcacagttgcagtgggaacactaggaatcaggctaggtaaatgacagaaactgggctgcttgggcccaggggcagaaaggaagtctgcctcagggctctgtccacctgctgtgcttccctgtccttgactgagcttggagttttaggccagagagtctgaccaatgcagcctggaacacattcttacctctttgttgaaggtacttatgaggcagtcccactaagactgtacatgacggtaggggtgatgggggaaacctcaaggaccacaggatgcttctggaagaagaggaaatggatgctggatttacaaaaaaacacaaatgtgcacaatactatattacagatgaaggaactgaggcatggagtttaagaatatttgcccaaggccacagagcggagaagtggctaagggggaccccaatctgtatagatccaacatctgcgtttggtccctaacctaatctgggtggggtgggcctcccgggacacctccagagctgatgtggctggatgctaatgactcctggatcagtcaggctccagcatctttctggggctgcctctgggactttggggctgcccttttggctttggtcgtggcccctgtagcctgggcaatgagcccagctgacctgttgtcacttccaatgaggccagcatggagaagctttagaatgggagggccctgggaggagccaagtccagacccttagctcagagctcattttaattcatggctcttttttcttctttctgtttgcagatcgggaggaccagtccattctatgcacgtaagtggaactgctttttcttctgttttttttttgtttttttttttttttaatctgtagtcgagatccaacctatgaaagaaaagatccatgagtgcagagatctttgatttgttcatggttccaagtgcctctctttatacctggcaccatgtagatgctcactaaacatttgtgatatatggtcttctgcggaggcaggcaaacttaaactcttaatgacacctgctatcatttggttccatacctctcctccttctaaaaaactagcatttattgaacatgtactctgtgccaggacttgaactaaagattttatatgcagaatcttatctaattgcataacagccatctgtgttgatagggaagatgttaaactgtcactttagtatttcacatttatcaagccacaaacacatcagtgccatatttggtgattggtatcactgtttctttgaagacctaggtacataggcagaagatagtaactcaattttagaatcattgagagagttttcactattgtatttatatgcaagtaacatatattaatatatattgttgattcattgacattgaactcacagccagcagctctgtggctgatgcctggatgaagtttatctgatgtgtatttattacataatgggtatcacaactttattgtgcttggaaacatgagccaacacttgagcactatgctggggacatttttgtatgtgtgctgccgaagggagcacatctgaggggacattttaaactgcaaaataactaacaaaaagccacaaaaatacaaaaaaaggtggcactaaatacactacagaaaggacacttgtttacagtatgagagttgaaactagaaggtagagcattcccctgttcaacctgagctgggaacgtgtgcattgggggaatcgaattttccttactctgcacatgttcacaaatgactacaaaagtgccatgaatattgattttggggttacaaataactttcagcaggtcggtgaatttgaaaatatagaatatataaataatgaggatagactgtgcatatatatatttacataatatataatatgtattatatttaatatatttatatttatatatatatatatttgaaggtctggaagcaactaaagctataatcaacagaggttatttaaataaaatatagcatttccaggtagccactacaaagagtgaggctgatctatttatgctgagagagaacgctctttatagataataccgttgagtggaaaacacaggggcaaaccagcatatgcataatgtaaccgtgtgtgtctttaaaaagagcaggattgcatggacgtgcatatgtttcctatttgcatgaaattatctggaaggacaattaaaaactagtaattagaatttcagatggtgatggatggtaggatggcaatgaactgtattgagagaagattgaaacaattaataagtttggggttgatatagatagaaaacctggaaacaataaaacaaaggcaattataaactccaggaaaaaacaaaagttgggatggaaggagaagtaatcacattggactaaggagcccagctgtgcaagtttggagtatttatctaaccagaataactccctgtgatggacttggctctgtggggaaagggaagaggattagatgggaactgaattctcatattccatggtaggatgtacacatttgatgtttgacaatgaatagtctggatctagagatataatgctacctagctatgaggatataaatgctaaaacaacctgccgacttggtttcctagttttctggcttctaggggtcacctgcattccttggctcatggtctcttcctccatctttaaatcctgcagcatggtatcttcaaatctctttctctggtccccctacctctctcttataaggcccagtacctttgtggttatattagccccacctagatgatccaagacagtctcctcatctcaagcaaacatattcacagattctgaggataggccatggacattcttgtgggggctgtttttcagctagccacagaggcatttgatcccctaggagccaaacccatgtgtgagccacatgtcatctccccaggaaccaaaatagtgtagctcaactgccctctgttgagtgaatgaattaagtgtggtaacagagaggtgcaggaaagagtaggactttcagatggcttcctagctatgtagctatgcacgggtcacttgacctctctgagctgagcttatggagaggctgtgaagatgaagaagaggccaccctgctctcatttccagcacccatgccatcagcaggtgctgtttcatctaaaacggtgctatccaaaagaactttgtgatgagcacaaagttcacttaaaagttcacttaattgagctcttaaaaagtggcaagtatattgcagaactgaatttttaagattttagttaatttagatagcggttcctgccttggacggtatgatgctgaaatatttctcatctctgtccattcctctgactccaccgcctcttcctagttcagggtcccgtcacctctcaccagggcctctgtagcagtctcttaagctccctgctcccattgcttgcttgcttccttcctttaataaatatacattataagaatattcactcattattcattgaataaatattcattagcatgctgtcataaagtgtggattccagaacctaaccccttgggtttgaattctggccccatcatcgtctagttagttgtatgctccaggaaataagtcagttcacttctctgagcctcagtttccccatctgtaaaatgggaacaataagcaccccattgggttgttggaaggatgaaatgagtcactacatgtgaagaactgagaaacaggccactgccccatggtgagcactttgtaaggatcagctgctattgtagtgaaagtgctcactattttttaaaaatccttcctgcaatccagtatccatcttgcagtttgtttgtttgtttgtttgtttgtttttgagatggagttttgctctcattgcccaggctagagtgcaatggcgtgatcttggctcacagcaacctccacctcccaggttcaagtgattctcctgcctcagcctcccgagtagctgggataacaggcatgtaccaccatgcctggctaattttgtatttttagtagagacagggttttgtcatgttggtcaggctggtctcgaactcctgacctcaggtgacccggggagcctcggcctcccaagtgctgggattacaggcatgagccgctgagcctggcccatcctgcagtttgttgttgttgttgatttttttgttgagacagagtctcactctgttgcccaggctggagtgcagtggtgcgatcttggctcactgcaacccccgcctcctgggttcaagcaattctcctgcctcagcttcccgagtattatgccatcatgcccagctaatttttgtattgttaatagagatgggttttctccatgttggccagcctggtctcaaactcctgatctcaggtgatccacccacctcagtcagcctcccaaagtgctgggattacaggcatgagccacttcgcccagcccatcctgcagttctgattctccccacactggttctaaagtcccgttcccctcgtgaaatggtttcctgcacccatgagaataaaactcagattccttactgtgacttggaagactgagtgtgatctgctcttccctcttcacttcctgctgtcctcctctgttgtggccctccagccatgctgggagccattctgtctcatacctgggcccagcatttccctcccttggacctctgtccatactgtttgccctgcctggcccacccttccctccatccttcccacagggctctcttgtaactttcaaggctcagcaactccctggcttccccatccacagcctcccctctcctcccttcccctcgatcttctcagtcacatcacccagatgtagcaatgatatctccaccacgaactatcttgattatttgtttacttggctattgtgtatctccatctcctggaatgcagcgttagcaaggacttggcacactgcccacacacagccagtgctggagaaggaggccttagccattgttaggaaggaaatcccaaaacgatcagacttttatttgcaaatgcatccagtcagcccagaaccaccaacatcttcagtctctgtattcaattttattttgcttgttgtgaaattcagccaaagtgacttgaaggacctacaagttgacagcagggctgagcttttacgcgtagttggtgcttaagagaagccaggctggagccaactgtttggttatgcagttaagaaactgaaaattggccgcgcactgtggctcaggcctgtaatcccagcactttgggaggccgaggcgggcggatcacgaggtcaggagttcgagaccatcctggctaacacggtgaaaccccatctctactaaaaaaatacaaaaaaattagctgggcatggtggcgggtgcctgtagtcccagctattcaggaggctgaggcaggagaatggtgtgaacctggggggcggggcttgcagttagcagagatcgcaccactgcactccagcctgggtgacagagcgagactctgtctcaaaaaaaaaaaaaaaagaaaagaaaagaaactgaaaattggccacgcaccgtggctcacgcctgtaatcccagcactttgggaggccgaggcgggtggatcacgaggtcaggagttcgagaccatcctggctaacacggtgaaaccccatctctactaaaaaaaatacaaaaaaattagccgggcatggtggcgggtgcctgtagtcccagctattcaggaggctgaggcaggagaatggcgtgaacctggggggcggagcttgcagtgagctgagatcacgccagtgcactccagcctgggtgacagagcgagactctgtctcaaaaaaaaaaaaaaaaaaaaaagaaaagaaaagaaactgaaaattggctgggtgtggtggcttatgcctggaaactcagggccttgagaggccgaggcgggagggtggctggaagccagaagtttgagaccaaactgaggaacacagtaagaccccattactacaaaaaatttaaaaattagctaggtgggatggtgcatgcctgtagtcccagctactcaggaggttggggagggaggatcacttgagcttgggagttagaggctaagtgagctatgatggcaccactgcacctcagcctgggcaacagagcaagacccagagacaggaaggaaggaaaggaagggaaggaagacaagaaaggaaggaaactgaaagctgaataaatgtaatttttaggcctgagttgtattttgtctagcatgtaatccatccagtataatcagtttaattagaggccatgggcctggctggagatagagctgtgtgatcagggggctaaagtaagaggaggagggtggtttcacataaaattagagagaggtaagggggtgcttccaggccctggggaggagtttaaactttcgtctaaaatggatgacaggctgggcatggtggctcatgcctgtaatcctagcacttcgggaggccaaggcaggctgatcgcttgagctcaggagttcaagaccagcctggccaacatggccaaaccccctctctacaaaaacaaaaattagctgagcgtgatggcatgtgcctgtagtcccagctacttaggaggatgaggcaggaggatctcggttcactgagcctgggaggcagaaagttggcactgagccaagactgcaccactgcacttcagcctgggtgacacagtgagaccccatctcaaaaaatatatataacaataaaataaataaatgaaatggatgagaacgtgctaagggactcaagccaaggaaggacaaagtttaaccagtgggtcaaatcaggcccttgtctgtctgttccagataaagttttattgaaacacagccgcacccacttgtttacgtatttgcttttgtgctgcagtggagagctgagcagatgtgacaaagaatgcgtgaccctcaaagtctaaaatatttactgtctgaccttttacaaaaagagtttgctaactcctagcttaaacagtgggaaaatgtgaatattatttatattgtaatgataggatgaatgctgaaaatcattatacaaacaatatataacttctgtggaagcagtggttataaaagtaataataggtgggcacagtggctcacacctgtaatcccaacactttagggggccgaggcaggaggattgcctgaggcctggagttcaagactatcctgggcaacttagcgagaccccacaaaatcaaaaaattagctaggtgtagtggcacatgcctgtcatcccagctactcaggaggctgaggtgggagggtcacttgaacccaggagttcgagattgcagtgagtcaagattgtgccactgcactccggcctgagcaagaagcaaaactctgtctcaaaaaacaaaagtaataataactaacattttggcataccaggcattgttctaagcattttatataaatgttcactcatttaatcctcataagaatcatataaaaggtcaggcatggtggctcatgcctgtagtcccagcactttgggaggctgaggctagagatcacttgagaccaggagttcgagaccagcttgagcaacatagcgagacccctgtctctacagaaaatttaaaaatcagccagctgtggtggtgtgcacctgtagtcccagctacctgggagattggggcaggagtatcacttgagcctaggaattctcagctgcagtgagctatgattgcatcactgcactccagcctgggccacagagtgagatcttgtctcaaaaaaaaaaaaaaaaaaatcatacaaggtaagtgtttttattatacccattttataatggggtaaagaaactgaggtatggagaggctaaatgacttgcctaaggtcacccaggtaactggcagaggagggatttgaacttgagcaacctggtcctggagcccattatgctattctgccaattgatgctataggggagagaggcgttgcttctgcctggggttttgcaggacgtgtaggagttgtacagtacaaaatgccagggtgctttgccagtcacataaagaccagggactgaatagctgtgaggttcatcagagacaatttggctttcctaccagtggcaaaccacaggctgcaatggacttggcaatattcgaccctgggagccaggaccagctgcagaatttgtagaattttgcaaaatgaaaatgctggctgagtgcagtgactcacacctggaatcccagcactttgggaggctgaggcgggcagatcacatgaggtcaggagttcgaggccagcctcgccaacatggtgaaatcccatctctactaaaaatataaaaattacccaggcatagtggcgggcacctgtagttccagctacttgggaggttgaggcaggagaatcacttgaacctgggaggtagaggttgcagtgagccgccatcacacactgcactccagcctgggcaatagagcaagagtcagtctcaaaaaaaaaaaaaaaaaaagaaaagaaaaaaaatgcagagcgtttataaagaattaggaagaatttccagatggcaacattagagtatgaagcacagggtggtccctgtgagacggtacaggtcacactcatgaagccagcctggctgggggattaagtggccattgggtggttcttcccagctgctggggctggactgattaaaaggacttggcactggggtagttacaaggccaggaggccataacgtggtcatgagtctggtccttctccgggaagagggagctcagtaccaaattccccaagaaataagaaaggagtttagggtgctcagaccaggaaggcatcttcacccctagaggtcaggggtcagaaaagccaagctatgaatgtttctagaaccagctctaagcacatcaaccttcagacgcccacgagcctggagcttgggatgttttctttggcagaacctcccagggcaatttatttttctcaacagaacttggaaacagtggagcccagcagcaacatgggaaggggtagatgcccagagtttatgtcccactccccatcccaggcaaagtgggagaccatagccacggatagggcacattgatgtctttgtttttttttttgtctgtctgtttgtttgtttgtttgtttgttttttgagatggagtctcattctattgcccaggctggagtgcagtggcacgagctcagctcactgtaatctccgcctcctgggttcaagggattctcctgcctcagctccccaagtagctgggactacaggcacccaccaccatgcccagctactttttgtatttttagtagagacagggtttcaccatgttggccaggctggtcttgaactcctgacctcaagtgatccacccgcctcagcctcccaaagtaccgggatgacaggcgtgagccaccacacccggtgatgtctttgttgtaaaagggaggaggtgagagaggttcaaggccagggtggaaaggaaggaactattgtgggaaaggagaagtgagcagcagcagtctaggagcactggtttgtcagcatgaagagtgtgatccacacatgttgtttgtgcacactgctgtcctgattcttgtcttggatctgaataggttcatgaccacctacgcaagtggtttcctacatccaaaaatttctctcctttctcttgctttaatcagaatccaaccccttcactttagaatgaagtcaagcaaggttctgacgttagcctgattgaagtaattcatacttaggtgtgaatgactgagtggcttggttcattgattggggcaagtaaagcctcctggaatatatggcagaattccagtggagtggggctgggacttcactctgtcttttctctttgctgatttgttaaaataaaagggtaggaggcagaacatgggccctggtgtcaagtggacctacgttcaaatcctgcttctcctccatttcctatctgtgtgaaagcaggagcaattgtgggctggagcaatttacttcaaacctctctttgcctcagtttccccggatgggtgatggggataattaataactctctcattagattgctgggtagagtaaatgaaaagatctgtgagcccaaagcctagtactgtgcaggccttcaacaaatatcaattccccttcccctgcccttcttctggccttagaaagcaagtccctagagggttgggcctgtgtcatggaacaacttggtgaaatgtagtaaaaggaattctgactgcattagaatcagagacctgactttccattctgactgtatcccttctttgctgtgtgacctagggaaaattgcttacccactctgggcaagactcttccttctataataacatggaagcaggaagaggataaaggaaataattcatgtagagcatttagcaaagggacccttccccctatatccccccaatgacaaacgccaattcttctctgtcttaagagatgggatcttgctatgttgcccaggcttctctcaaactcctggcctcaaggcatcctcccaactcagcctcctgagtagctgctattataaacgtggccagttctctgctgcacctggccagttctcctcttttacacacacacacacacacacacacacacacacacacacacacatatattctggtcttagtttccccttctggggaaatggggtaatgccttcatggtccccatttcataaactgcctctgaggccatgtgaaataatgtggccattgggaaggaaggcctctaggaagggaagggaccacacaaagtcaccgcaagatgtttcatcattcttggccatcagacacttgatttctggacagtgggacctgtaggattaggcacagcaatttggggcactttttttttctttctctttcttttttcttttcttctatttcttttttaagccatgagccaagttattaatgggcctttggcagagaaaattaatttctttatttcctaattaggaagaagagcagagactgtactagctttggtggcactggttcagcacagagaaccttgggctgacctcggggtgaacaaattcttttttcaacttaaaaaaaaaactctcttatattttagagtattaagtgagctcagaaaataaaagagataaggcaaagaaaggaaacacaaaaaacaaaagtaaactgaaaaatagaagaagacgataaacaagtgaagttttggtcaaggcactgtccttatctttcactaggagtggtggaacatagaggcagtatctggatggagcggttccattgtgatgatttctggtggccaaaacaggcagctagtgcacgaaagccatcttggtaaaaaaaaaaaaaaaaaagatctaccttcatattccaggaggacatacttttttgatacgacaaaccatgtcgtgctgatctaaacatatcagtcatttacactttagtgtgaattacttcaactgggtttattcttagatacttggctgagatcatcagccagcttcctgatacatggggtgggattcctcagaggataaaggggcttgcatctgcccagtgaccaatgggataaccggttttttggtaaatttttctttccataagggagcttcttaaactttaggtcctggtactccagaggcacttacatcctttcttgaaggctgccttgtgcctggtctttccatttctagcaatgctaatgatgtctgcaggcggatcacgaggtcaggagatcgagaccatcctggctaacatggtgaaaccccgtctctactaaaaatacaaaaaattagccgagtgtgctggtgggtgcctgtagtcccagctacttgggaggctgaggcaggagaaccagggaggtggagcttgcagtgagctgaaattgtgccactgtactccagcctggggacagagtgagactccatctcaaaaaaaaaaaaaaaaaaaagtagataattccaaataaacctgtttggacctatgtaagaaaactaaggttttcttgttcactctatttttttagagatgaggtcttgctctgtcacccaggctggagtgcagtggtgtgatcatggctcactgtggcctcaaactcctgggctcaagccatcctcccacctcagcctcctgagtagctgggactacaggcatgcaccaccaagcctggttaatttttcttattttttatagagtcagggttgtgctgtgttgctcaggctggtcttgaactcctggactcgagtgatcctcctgcctcaacttcccaaatagctgggactacaggcatgtgccaccatgcctggctaatttttaaatctttttctagaggcagtgtctctctgtgttgctgagctggtctcacactcctgggctcaaatgatcctcccacctcagcctccccaagtgctgggatcacaggcatgagccaccacatccggcccaccttttcactctttgtatctgaattcttttctatgtcctcttggaaggaatagattgggcattggacctaggctggggacccagttccgctcactaccagagatgtggccttgggcaagttacttcccctctgggagcctctgtttcaccctctgggaaatggtggtgatgatcattattgtcctgcctggctcatggaactgcggaaaggtcaccatggaacgtgtgcatagatgatgttcccgtgtctttcagaggcgagtctggagccgggaaaaccgaaaacaccaagaaggtcattcagtacctggccgtggtggcctcctcccacaagggcaagaaagacacaagtatcacggtgagtggcagttcccaatcagaggccatgatttagccaaccggtctccagcttgcagcccaaccgagatacaaacagaacatcattgcaagaactcaggccccatctgactacccctcccctgaagactcaaagagggaccgtctttttggcgagcaggcctgttgagtgtgggtgatttcttggctcagctagaagcatccctccagaagggggcccgttttgtgaaatgagaataagccctttccttccatagcgagatcttcctccacgtcggggcttctcagtggtggcactgatgtcattttggaccagataactcttccttggaggggcttccctgtggctcgtagaatgtttcacaacatccctggcctcgacccgccagatgccgacagcccccttccctccagttgtgacaaccaaaaatatctctagacattgtcagatgttccctggggtgggacagttgcccttgattgagaagcactcctttcatgaatctctgtaacgtcccaggggttaaggtaccttttgggttcccggattcctccacgtgtccccctgtccctgggatggagatgctggtatcactcggcccgtgggcttcagtgcaatgccattcagtaactgtggattgagcacctactgtatgccaggaaccacttggggtggggacctggggataagtctgagagatgctgttattctcttctctgagcttccagacctgtggaagagcatgtagttgtcaaagaatccctcaaataaacagatgatgacacggtatgactaagagcttgggaggaaaagaagagcaggtttctagagtcatcacctctagggcccatccttctcttcctcctcgtgtgtcagccctgccccatctatcccacaggagggggcacgtggtagggccgctaggactggccggtgcctccgtctgcaggtttgtgggtgggaagatggtaggatggagatctgaccacggcatggggtgtctccagtgttcgccattccagatgtcactttgcgtcctcagaggggactctggggcagccaccatggccggcttgtctggaggcccttggagatctaggatgggcgctggtcgtggctttggagaactttccttctccaaacaaatgcaggaaactcaagattcagcatcctagaattgtctctggcaagttggtttccagccatagtgagtgggaacaatggccccagaggctgtgtggcagtttaaacacagtttccactgccttccctttccctaaagagtaaacacaggagataatactttctaacaactcatcgttatcaagggcctactatgtgctgcttgttttggctgcatgcgtaaacacatctcagacattgtctcactggatactgttttaaggagcctaatgtggccccagtaattatgaaaacctttgaaatgtctggatctctaagaaattagaaaaaggagggaatggctgagcatgggggctcatgcctgtaatctgtgttttgggaggccaaggtgggaggatggtctgagcccaggagttcaggaccagcctgggtgacatagtgagaccctgtctgtaccaaaaaaaaaaaaaaaaaaaaatcaagagaattagctgggcctggtgtgcatgcctgtagtcttagctacttgggaggctgaggcaggaggattgcctgagcccagtaggttgagactgcagtgagctgtgatcgtattcctgcagctaaacagagagaaaagaaacagtatcaaggaaaaggagctgaccagtctgtctgggagactccaggctgtttggggggatcaaagtcatatattctccagcccctgatgtccatgtgatggaaataacgctgacatttgttttatactgtgttgttcaaccacagcaaggcccatcttttgcctacgtgagtaactgagagtgttttcctggtgtgtaggggaggcacggagtgaacttagatctgcatgatcctcttgcacccaccgagtcccgtagctggtggtagaaatggggtaggccctagagtttcacaacttaaatcagtaaatgcaccaaaataccatcctgtgggtgtctgatgccagggaagggtgtgggggtgcatttaccacccacgggacgcctattggagtccccagggttgcgctccagcctgaaatggatttctccggttcagaatgaacccctgcacccttcaaagcatccgctcctggtacccttgactggaacaacctagacagagatgtctgtcccatctggctgagtgttttaggactgtcaggccccaaagcttccctggctcgatggacagtcgatggcacagctgtggcatgcctccctcttctctccctgccatcatccctaagtgtcttccctcagccctgtccctggtgcaccagtgtgtccctgtgcatgcgtgtgcagtgcgtgtctgtctcttgcatgctggttgcttgactcaagcctccagaaacagtcttggaggtcgcgatgcactagctttggtggcgcggtaaggccccagctacgcaacgcataacctggtcctgcttggacctgtgcatatgtaaactcatctctaacacagagcttggggggctgatgtgtgggtcccagcctagaagaaacccacaggtgtcttccttggctcccgaaaagatcattcaatccatcttagttagaccctgggtgactgtgttgcagatcagaaggagaattacagttcttatttgggatctgcttttgtgtgaccttggccgagtcagttaactcctcggggctatggtttcatcatctataaaattgagggtttgaaccaggtcccccgatttaaagctctcttgccaagacttttcaaccttacctgccagaatccccattctagaaagggagcctttttcagagagcatggagaccccaagtttatgtgaacaaaagtgattcctttagtcgtcttcccaccaacaaagaaatgcccgtggtgctccttgtaaatttccaccagtctcagctgtggtgattccacttgtagctgagatttgtatgcggatgaggcttttgcttcatctttctctgggagctacaaaaaggaggatgtgtggacaaatcaaaacagaaacaaatagcagcttcctgctttgtcctgtagaccaggtaccctgatgccttcctagcatgcggaggaatgaggaggaagccatgcccatccttgtcccctctagacactttcccggctcctgtccagcccagccctgatgcctggaaaaataaggaagggaaagcaggaggggaggacaaggagaaaaactcccagaatccagggcctggaggcctcggggcccaactgcagccgccatgttttagggctaggccaagagcagctcgtttgctttcccagcttaacttaccacattggccctttcctgccatgattaatcacgtgaccgcgtttgtgcaaaggcatcccggcagagggggccggtgggctgtgtacagtctcagcttcctttaacccaatgaatggagctcaggcaacctgctttgaagctttattccgcagtccgctaagaggattcctggtgggttttgtgcattccttacttgtctgctgtagaagacttcagaaaaccagtcctgagaaagaaaaaattgcaacttaaaaaaaattgcactaaaataattagaaggaggcttgtagtggtttaacttgaagaaggctgcttgttaaacatgaacagcagcacgactgccatgtacagtgggacaggtggtgcactgcacaactccggggggcaccattcatcatgatgtaaatgacatcaccgacattgtgcaaggcagtggctttgagtggcagtgatgttgcacagatgagcaggccctggtcttgaaaaaagtgaccttcctagggagcagatgtcctagctattagagagctcagacagttgcttctcttctgaaatcctcctgtaaatctgaacattagcatcagggtctaagaggaggtaggagataggagagaacctgtgggttaagggcagagttttgtgacaacatccatccaaggtagaactgtcaggacctaggttgctttctccaataactagatgtgaatgaattttagggagagctggaaaagcagcttctacaagcaaacccgattctggaggctttcggcaacgccaaaacagtgaagaacgacaactcctcacgattcgtaagtagcaaagccacatggattttccagaaaagctttggtgtcatctcctgcctggggctgcagagtgtttgcgtgcagaggtgggaggggcatctgaccctggagagatgggctgtatctcacaatcttgcaagggctcctgcctctcactctctcattcattcattaatttattcactattcactcaacaaatattgattggcctggtgcggtggctcacacctgtaatcccagcactttgggaggctgaggtgggaggatcacttgagcccaggggttctagaccagcctgggcaacaaagcgagatcccatctctattattaaaataaaatttaaaaaattaggtattgagcacctggtatgggctagacccttatatccgataccattttatgtaacaaaacatgaattgagtgccaactgtgtaccaggcacacacctcctccaagaaatacttagtaagtacctactgtgtacaattactctggtaggcacttttacatgtaccaccattctctttgtttttttctcatttgctgtttttattaagtgcctactgtataccaggcactcagcgagtctcacaggattgcgatgaatagttcagatatggttccagccttcatgaagctggttcttccaactgaataacagagagtaagtgaggcagggggtactaccttcccatgcacactcccccaggctccaaagcaaaaagtttttgcctgagcccaacagggcaggggaactctgaaagtggatggttgatgataggtagacaacaatggttttattgtgcaaaagaagcggttgtctccgtaggagggtcagaaagatattttagtgagaaaagatgaaggaaaaattgcctctgcattccaggagaagggggtctctgaactgttgctcgctgagatggggccctgtgaaagactctttgcagaaagctctgctctgctgagcaaatgcacatggtggtccctgaccctgtgatccccaaggcccattttagtaacaaacaattacataatgtctcctttcctcgcccgaaattagaatcatagatagtatcacctcctacacgtattagatgaatacacatcagcataatgccctaactggaatatgaagaagaaataacataagacaattcataatgaaagtgtgcatttcaggccaggcgaggtggctcatgcccgtagtcccagtactttgggagactgaggcgggcagatcacttgagctcaagagtttgagaccagcctgggcaacatggggaaaccccatctctacaaaaataaataaataaagtgcatttcagcatatcaatgctcgggccaggccacaccaacagaagacacagtaagagacagacacttaggtctatccacggcgacagctacaaatacaaggaaaagggtcaagttcaggcactgatgatgttggcatgggattttccagaatggcaactgactctcagtgaagcgctgaaccaaagaacaatcttctctagagtcacacagatgggatattcttgtattagaacaacattttaaacacttgttaatgctttcatttaaaagcataaaaatctagaccaggcacagagtggctcacacctgtaaacccagcaccttgggaggctgagttgggaagatcacctgaggtcaggagtttgagaccagcctggctaacatggtgaaaccctgtctctactaaaaatacaaaaattagctgggcgcagtgacacatgcctgtattcccagctactcgggaggctgaggtgggagaattccttgaacccggggagatggaggttgcagtgagccaaagtcacaccactgcactccaacctgggcgacagagtgaggctcttgtctcaaaaaaaaaaaaaaaaaaaaaaaagcgtaaaaatctaaagtcataaaggttaggttctaagcctggctaattacaaacagatttttacctccatgagtggcaggtgagacattggaagagtcataagggatatagacaaggattggcatcagagactctccaggtcattgcaggactcccaaaatatccttggccccactgttcactaacaacagcggcccccccccaacatgtgacaagccaaataatggcttccaccgatttccaaaatctccatagcagatgtgccgcctccactgagaagcactgcgtttgcatgttccaattctgtgcaatgtttctagcctgtcataaatggaagcacgtgcaagacaaatccctaaaaacatcctccactcactggcgtccctgccatcttgggaaggagagtgaagaaggtgcctgggccttgcctgtgaccagccggctctccctggctccatctgggatatggtcatcccaaatcactctactgcatgtttcccaatggggaaagtttgaaggttttgtcaaggactgagcaagcctaggggattgtgtccacacacgccaacacttcccaccatgttatgtcatgatgggggaaaaggatgaaatcctgtctcacctgttgaggaaacaggaaaagggttcatgccaacagatggaggattgggttccatccttggtttcatggcttagctgaggcaggtagatagggccatctttggagatacttgttgagcctctagggccaggaacatgagccattcctgcctaaaggacatcctacacagggcctgcttgggcagtgtggccaatgcatactcacctgtcccacagaaaaggtttaatccatagttggatgatgtggatgttttggagcagggtggggtctggggagggagccctctagcccctgaatatggaaaaaccttctttctgcttagggccctacctctcaggagcaacgtcacgttggacaagtcacttgatctcttttagccttagttttcccagctttaaaatggggatagtgggctgggtgtggtagtttactcctgtaatcccagcactttgggaggctgaggtgggaggattgcttgagtgcagcagtctgaggccaacctggacaacacagtgagatcctatctctacaaaaaaaaatttaaaaattagccagatatggtggtgcatgcctgtagtcctagctgcttgggagggtgaggtcatggggaaaaggggattgcttgagcccaggagttcaaggttacagtgagctgtgattgcaccactgcactccagccctcgctgacagagcaaaaccttgtctctaataaataaataagtttttttaaatagggatagccatgatggactacggtcattgcaaaagccgaatgaaattgatctgtgaacatgttttacacgttctgttgctgtcaggcctggggtggtttcagctcagcagatgttggttccgcctgacaacttgacctgtggggttctgagtgttcgcaagaatctccccgccccacctcccatcctctgtaccatctgcctcctgcttgcccacagcatggggttaacggctgaagttgggcagcaaagcctgaactgtgttttcctgttggcagggcaaattcatccgcatcaacttcgacgtcacgggttacatcgtgggagccaacattgagacctgtatcctttccctgagcctgggccaaatgggtacccctgccccctaccaatctcctgcccagaggctgggagagtccaagagccacctctatctttccagcctcttaggtttcttccagaacaaatctccccttaacagcaggcattgtggtgcagtggttatacatgtgtggaccggacccctggtttgaaccctaaacaagcagcctaggctgcatgtgatgctcaaatgatctgtcccttagctgagtgaccttgggctggttactccacctctctgtgcctcatcagcaaaatggggatgataatgaatggtacctgcctcatagaaatgtgagaatagagtgaatgaactcatataaagctctaggcaccatgcgaggtgcagagtaagggctggctacgtagtgtctatcgtatgatcttcacttcatccttattcagccattgtccgaggccaaattctggacctgtcgtcctcttagagagttggtctgtgatcggctccacttcttaggtaggaaattgatgaaaacagagtttacccagaagaatgctggtatcgcaaggaacaagtagagcatctctttcatgaacctgagcggtgaagtggagccaagttagaaatttctggacgtgggggaacaaccaggtctagagttcagtgactgatcagcctcaggagctttgcaggcggccctagggctcaggcttcctgtggaacacgtgcttggcaatgtataggacctgggggcctgacttagcttctttctgcacctgaggtcctctagcagcacctagtggtcccatttttccacgttatgtgccctggataagagggtgggttgtggagtagcttcctctccactgtacttgtctaagctgtggggatttgggaaaatcactgaagctctctgggcctcagttttgcctcggtaaaatgggggtgattgcacctagtttctggagctggtgcaggggttaaatgaaataatatgcataataatatgcacagcccttggtacggtactgggcccaaagtgagcatctcataggtggtggctattgcgttaactcaatgttttctacgtttctactttaatctgcccaaaccagccaggattcccatcctgcagctaggagggctgtcaggcttcggtcaagtccagagccagggccctcttgtcctgcagccctgcacacacctctcagcaattcatttcctgtgtttagagcgagccccaggcatagccccgtccttctggcctcagccttccttttagatcagtggttctcaaagtatgtttccaaaccagcagcatcagcatcacttgggagctctttagaaacacacatctcagccaggcacggtggttcacgcctgtaattccagcactttgggaggccgaggcgggcagaccacttgaggtcaggagttcgagaccacctggccaatatggtgaaaccctgtctctactaaaaatacaaaaattatccaggcgtggtggcatgcacctgtagtcccagctactcaggaggctgaggcaggagaattgcttggatccgggaggcagaggttgcagtgagccaagatcacacactgccctccagcctgggtgacagagcgagactctggctcaaacatacgtgcgtgtgtgtgtgtgtgtgtgtgtgtatgtgtgcgtgtgtatacccatgtacaccatgagaaagtctgagaatcactgctttccagattggacatgggctgtggtagcccgggcactgctagctggctttaggacttgaagaagacaaggtctgctgatctagccccatcatcccgcaccatcatgcttagtgctgtggaaatccacccagtacagtagcccagcctcccagctgccctctcccatcaccccggaccctgtgatctccatgccaccctcacctgccctcccctctgctctccctcctgccaccccgcatcgcggagaagctctcctgaaattaattagtgtggcgtgtttacggtctctctcgcctccatcccgtcagaccccactcttggaacagagggcatggaagacagctttgccacttgttagctgtatcatcttgagaaaggacttctcttctctgagcctcagtttccccttattgaaaacaccgataatagttgcacttatttcctagcatactttgtgaggcttcagtgagacaatttatatcaatcatttcacacaggaatgaatcataaatcataggatcatagatggtgtcattatttgtattctgtcatgtctgaagacagctcattttaaagaagatttgctggtgatggctgttaggggaacatctcgttaccattaccttcttcctggagcctttttatgctttttcttttcactctattcccctcccttttttttgcatctgaagtctgctggcagcacccagcggttccatttgtccataggggcaatggtcaaagttagacattaccgatcccaggggtagaactggaaagtcatcccatgtgaattgggtgtgacagggatggaggtggaagaccagaggaacacccgcagtatccccagaatccctaactccctccaaaccagatctgctagaaaaatcacgggcaattcgccaagccagagacgagaggacattccacatcttttactacatgattgctggagccaaggagaagatgagaagtaagtgactagcaatgacatgtgattggatggcttgagccttccctttcatcagaatccggggttaagggattggctattaaaacagtctcagatcctgccagaaaggaccatgtctgtgagtgacatatgaacagttcttcatctcctcccaatgagtgagtgtggcttgtgttcagtcattctcatttactgagcacctactatgtgacatagtagccatcaactccaattagacattagatcattaatgattcatgtctcattagaccagagagcatcaagtccaactagacacaatctacgccttcaaggaaagggagaaagacatttgccttacttgccaatttataaaacttgcaaatataaaagatgcattctggttttataaggaatttgcaggggcagcaggactaagcatttttcattatacatgttttgccagtgactttgtagaacaggggtcaagactttttctgtaaaaggccagatagtaaatcttcaggctttgcaggccaggtggcttctggcacagctattcaactctgccattgtaatacaagagcagccacaggcaatatataaaccaatgagtgcaggcaacacataaaccagtgagctcaggcaacacataaaccagtgagctcaggcaacacataaaccaatgagcacaggcagtacataaaccaatgagcacaggcagcacataaaccaatgaacataggcaacacataaatcagtgagtgcagatgcatcactgtgttacaataaaactttatttacaaaaacaggcagtgtgcagaagtttgctgacctctgttgtagggaaaagtttttttatgtaaatataatacactgtataccaaactccagtaggaagttatgagttctggacctgcagctgtttactaactcttaaaaatatatacaaatcgcatagcttaaaaaaggaatggatcagtgactatctgtacatagtagagtctacatgttagtaataagttttgagtctgaaattctatgggaacaatacagactttgcttcccatctcttttgtggcccaaggttagttattttggttaagacagttaccaaaaggatctgtgtgagctcagaacttcgctgtgtcggagtgtattgtagacctcagctactagggggtggcattatccattatttaaatttccagggtggggcaaagtggctcatgcctgtaatcccacactttcggaggcagaggcgggcggattacctgaggtcaggagtttgagaccagctcggccaagatagtgaaaccctgtctccccaaaaatacaaaaattagccaggtgtggtggctggcgcctgtcatcccagctacttgggaggctgaggcaggagaatcacttgaacctagaaggtggagtttgcagtgagctaagattgcaccactgcactccagcctaggcgatagagtgagactctgtctcaaacaataaaaataagtttccttaatggctggctttcaggaacataggctatgaggtggagcaatttttggtaaagggggaatgctgaatggattttttatgtaccagcaaacatggtatattagcagttacagtgcaggaccctgtggaatgggccagggaaaaatgttgacattccttttccttttatttggcacccaagaaaacagtttggttgtttggtaccttgggttccagttttgtgctttgcctctggtcttccagaaatgggcaagtatagggctcagaactaaattcccaggggccgtttgtattctagatgatagaactggaaagatgttaggcttttagaaagaaccaaatattgctaaatgcatccaaactcgggataatgaagtcttggcaaagacctcaatcctcgtgacttgaatcaggcatttcaagttaatccaaaagtttgagttaactggtgccttcagtcaatttaacctcgagtttatcaagcagcttccaagtgacttgacccataaaagaccttgattttgaaagaaaaatatcttgctgacgtctctccaaaagtataaccgaatccatcctaattaaagattgatctggaagaggatccttgatgtattggagggtataataaaagcaaatggtgcaggagaaagaaaggcaattataaagttgggggtgggggagaagctgaacaacaacaaaggaaatgtaatcataggatacagtttgacacagaatatctaattaatgtcataaaaagggagttggcaaactgtttttgctaaagggtcagtagtaaacgttttagactttaaggaccagatggcctctgttgcaactactcaactctgttgcctagtgagaaagcagccatgagaaataaacaaggacatcagagcagctgtgtttcaataaaactttatttacaaaaacaacaggggaccagatttgccaacctgtgatataagccttatatattgattcaactaaaaatagctgggggtggctgggcacggtggctcacacctgtaatcccagcactttgggaggctgaggcgggtggatcacctgatgtcaggggttcaagactagactagccaacatgatgaaaccccgtctctactaaaaatacaacaaattacctgggcatggtggtgggtgcctgtaatcccagctactcgagaggcaggagaattgcttgaatccgggaggcagaggttgcagtgagcagccaatatcgcaccactgcactccaacctggacaaaggtgaaactccctctcaaaaaaaaaaaaaaaaatagctggaggaaaggaaaggtagtataagaaagctgcatttttgcctaccatagcaggaagtcactagatactatctaaacttgacatatccagaaatcgcctattacagcgattgtgctttgcctctggtcttccaataggccaaaagcacctgttacttttggcactgaggactggtttcctggaagaaaagttttccacagactgggcgggcagggttggggggatggtgtggggatgattcacgtgtattacatttactgtgcactttattattacattgtaatatacaatgaaataattatactagtcaccataatgtagaatcattgggagcttgttttcctgcagtcccatcggggggtgatgggggacagtgacagattatcaggcattagagtgttataaggagggcacatgtgcagctcacgatagggtttgcgctcctatgagaatctaatgctgctgctgatcttatgggaagcggagctcagacagtgatgcaagcgatgggcagcagctgcaaatagcggataaagcttcacttgctcacctgctgctcacctcctgctgtgtggcccagttcctaacatggaccggtactggtctatggcctatgggttggggaacccttggcctatgatatgtaatacataatggtatatacattataataggctagtatatatagcaagcctattgtacagagagatagtggtaactgccagataaaaagcagctaaaagagataaaagcaggtattatggagtaaggtagagttggagaagggatgtgacaggagaatgctatttttcattataaacctttggtagtaattgatttttaaaactcatgtgcctgtttgaatttgataaaaattttataaatacatgaataaggccaggtgcggtggctcacgtctgtaatcccagaactttgagaggccaaggtgggtggatcacctgaggtcaggagttcaagtctagtgtggtcaacatggtgaaaccccatctctactaaaaatacaaaatttagccgggcgtggtggcgggcgcctgtaatcccagctactcaggaggttgaggcaggagaatcgcttgaacctgggaggcggaggttgcagtgagccgagatcgcgccactgcactcctgcctggacgacagagtgagactccgtctcaaaaaaaaaaaaaaaaaaaaaagagtaaaggttgatctaactcttctgacagctttgtctctgaaggctgaaggcagggtgcctctagacaattgaggtaaaggcatcccttcctccaggtaaatgtaacttcgtgccagggattgtggcttagcaagcagaaccaaggctggatatcagctgcagtcactggagcagtgcacaacctgcaccgctgtgtaaggctggcagtggttggtgaggctgtctacgtgacgatgcgtgagggctttaaacggttcaagccttgataaagggaaaggaattatgatggcccagacccttgaccagatctcggtctcatgttgaaattagaagtatgtcttattgaccctgacctgtcttcctctccttctaggtgacttgcttttggagggcttcaacaactacaccttcctctccaatggctttgtgcccatcccagcagcccaggatgatgagatgttccaggaaaccgtggaggccatggcaatcatgggtttcagcgaggaggagcagctatgtaagcctcacaccttgagtctggagggtagcttgcctggataccagtggaacctgttaagaactcttctctggtcaggacagatttctgctctctgaattccccaccttccattaaaaaaaaaaaaaaaaaaggaggaaaatgaattttattctaggtggtttgtttgtgttgtagaaaagtggctgtataactagggttgcaagtaacccgagctggcttaaaccaaagggaaagtgactaactcagaatgttgagaagttcagggaggttaggcacagtggttcaggtctgtaatctcagcgctttgcggggccaaggtgggcggatcactttaggtcaggagttcgagaccaacctggtcaatttggtgaaaccctgtctctactaaaaatacaaaaaaaaaattagccagggctggtggtgcacacttgtagtcctagctactcaggaggctgaggtgggaggattgcttgaacccggaaggcagaggttgcagtgagccaagattacaccactccactccagcttgggagatggagctagactccatctcaaaaaaaaaaaaagttcaggaattcaagcttcaggtacagtgagatctaggtgttcaaaagatttttctagaacctaatttcttgtcttctatctctctcgactacattgtttctctataggatgcagtttgttgacagcaacatagctgggttccagcccttatattctttgggtttatgtccaaagaacagagtagattcccggcttaagttcctgaatggagtgtcattgactctgattggttggcttaggttgatatgcacattcctgagctatgcagcataggcagggttgtggaaagcgcagggtggtttcattatggtccctaagaatggattcttggagctgaaggtagagatgttggcctcatcaggaacatgtgggcagggtttaggggagggggagtgatcgaggcagtggatttactcaggcttttcctggaggggttgctctggtgatcaattgatattgatcaaaatcatccaaccaatggccaagaaacacactgggtcttgagaacaggacagctcagaaagaaattcttggtcgggacactgtgtttccagaaacgattttccttctgcgttagatgtgcctcagtgttgaaggttaatctctttcaggaacaccaggacagaactgtggaaagtttcccttccttcccacgcctacgcccgtttggagccccagaatagcactgaggttgctgaaatgctgcataaggggaggggcagctcctccgaagataacttggggtctggaaaattaggctgtatgggtcagttgacaaatggatggtgtatgtgggtcttggccagggtcccacatcagaatctagtgctgatagcctccttgtctgaatgacataggccctccaagaatgattcatttcatttgggacaggggtcagttttgcttctaatcttgcttttaaataacaatgaacaatggttaagtatttgctgtgtgccaggaatttaccaaatccttttttcttgatgtactacactgttcagtatagttttatttaaataataaaaaactggaacaggctgggcacagtggctcatgcctgtaatcccagcatttggagacactgaggcaagaggattgcttgagcccaggagttcgagaccagcctggataacacagtgagactctgtctctacaaaaaaaataaatagaaaaaaactggaacaaactaaaataggttgattaatagagggtttattaaatcattgtctgtccttgtgaaagaaaacaatgagaccatttaaattgttttgctgggcatggtggctcacgcctgtaattccagcactttgagaagccaaggcaggcagatcacttgagcttgagtttgagactaacctgggcaacatggcaagatcccttctctacaaataatacaaaaaattaactgggtgtggtggtgcacactgtagtcccagctacttgggagactgaggcaggaagattgcttgagcccaggaggtcgaagctgcagtgagccgagatcacaccactctgtcacctaggctggagtacggtggcgcagtctcagctcactgcaatctctgccttgcaggctcaagcagtcctcccagctcagcctctcaagtcgttgagactacagacatgtgctaccacgcctggctaatttttgattttagggtttttgttttgttttgtttgagatggaggcttgctattgtcacccaggctggagtgcagtggcacgacctcggctcactgcaacctctgcctcctgggttcaagcaattctcttggctgagcctcctgggtagctgggattataggcgcccaccaccatgccccactaattttttttgtatttttagtagatactgggtctcgccatgttggccaggctggtcttaaactcctgacctcagatgatccacccatcttggcctcccaaagtgctgggattgcaggcatgagccaccgtgcctggcctggggttttttgttttgttttggtttgatttttggaggggtgggtagagacaaggcttcaccatgttatccagtattctctggtcttgaactcctgggctcaaacaatcagcccaccttggcctcccaaagtgctgggattacaggcatgagccaccatgcccagtccccagtgttctcaatgtactttggcacttgtttcccctttaaccacagagaccagactccaggcccagcaccttcggcagccccaagcatctagctagaatttggtaatactgttttccttgtatttatatttataattgccatctatttatggcaagtgaagatgatttgtcactgaagatagagaaagttttctattaaaacaaatgtaaggaaagagaaggaagtaaatttaaagaaaatgattaagcaaataatggagcagatggtacacagagcaagcattcagacgatggcgtgcaaatgacgaactctcataggaaccaacttagtcctaaatgtacaccaaccccatttataaaccaagagctacttccaaaccctccatcaaggggcctatggagaagggggtgggtcaggcttcaggctggagcttcatgaggctccaagtgaccaggggacaccaggattttccccaccacattgggttctgcagccttgaactcctggcctcaagatatcctcatgcgccaccatgcctggcctggttatactgcttctaatgtattttgaagataaaaaataaaatcacctaaattgtccatcctgtgtatccctggtggtacacatgtctgatgttggaaagtcctgtttcttattcctcagcaagaagagaggtgtaaggccactgtaaaaaattagcacaaacttgatgccttaaaacaacaggaatttattctctcccagttctggaggccagggttctgaaatcagggtgtcggcaggagccgggcataatggctcatgcctgtaatcccagcactttgggaggccaaggcaagaggatcgtttgaggccaggagttcaagaccagcctgagcaacatagcaagaccccttctctactaaaaatttaaaaaaaaaaaatttttttttttttaaaagacaagatgttggcaggggttgttcctcctggaggcactgagggagatctgttccttgcctctgtcctggcttctggtggctctggctgttcctggcttttccttggcttgtctcactccagtctctgcctcatccttcatgtggcattctactctgtgggtcttctcttctgtccatcataaagacacttgacattaaatgtagggcccaccaggttaatccaagatgatctcatcttgagatcttgtacttgattccatctgcgaagaccgattttttccaaaataggccacgttcaggctgggcgcggtggttcacgcctgtagtcccagctctcagggaggcagaggcgggaggatagcttgagcccaggagttcgagacctgcctgggcaatatagtgagaccccggtatccacaaaaaggaaaaaaaaataaatgtaaccccccaaattaggccacattcacaggttccaggtggacatattttagaaagaccaacattcaacctaatataggtggcttccactctttatcacctactaggccaggcccttgctcagcatcttacaagacctaaacttcacgaagcaggtactactgttaccatctccgttttgcagatagggaaactgaggctcatgggacttattgagactcatgtagagtctctatcctctattcatccatgattcatccatcaatccatcctctatcatccatctatcctctactcatccttccatcacccatccatccatcacccatccgtccatccatctacccacccatccatccatgaacccatcctctatacatttatacattcatccatccattcaccctccatctgccatccatccatctccctccctccccatgtgtatctggacccggaactaggatttggaaattcagagataatgagatttataagaagcaaagctgggatttgaactcaggactctctaactgcagagcgcgtgctttgcaccagcacaccaggatgctgccagccgtcaccacccttgctgtgttgtgtctcctcactggtttacttctttgctgtctgctaattctgccccaaggttcatctcttatggcctgggagtggtggcattcttttgtcatttctggaattacatttaactataccagaaagtgcaaaccaatggttcctgagcccacaggagagatcggccactacaaccttcaaaatttttagaaattggttcctaaagtttaaatatgggtaggccgggcactgtggcctataatcccaaccctatgggaggccaaggcacatggatcacttgaagtcaggagtttgagaccagcctggccaacatggtgaaactccgtctctactaaaaatagaaaaattagccgggtgtggtggcacacgcctgtaatcccagctactctggaggctgaggcaggagaattcccctgaacctgggaagcgcagaggttgcagtgagccgagattgcaccaatgcactccaacctgggtgacagcaagactcagtctcacacacacacacacacacacacacacacacacacacacacacaccaaaaaacatgggtacacttcacataaaaactctgggtttccattatctagaaaaatcagaagttccagcaacacttggcttatatcccctgtggcaatgacggagtagctgctggccccttcagatgggtttgtggcctccttgggtccccacagtcctcattagttggctttgttcatttagaccagtggttctctgccagaggtgagtttgcctcccaggggacattgagtagtatctggtgacatttgtggttgtcacaactctgtcagggtaaccaccactgacatctagtggttagaggccagggatgctactaaacttcccatgatacccaggacagctccccacaatagagaattatctggcccccaatttctgcagtgacaagattgagaaaccctgagttggccggctcgcctgggctgtgcaggcatttcaggaatctttagtttaaattgacacttttaaaactgtgagtgcaactcttcatagtttacaaagactctttcatagatgttatggttaaaaggaagtgtgtttccaagccctgtcaacagcagcttcattcattttggggagaaggctttctaccatagtaagtgggagcaaatggatgggtggtcagcagctgggtccttttgctgagctgggccagggaccccatggcgtgagaatagctgttgtgaagggccttgtaatgtctggtttggcctgaggaaccagagaagtctgggatctctaggctttgttcctggaacatagtgactgatttgaagccagaactctgggtgatttgtacctgagttaagctaagccaagaatttgcattaatcatcatccatccattcatccatctaccatccatccatcatctgtccatccatccattcatccatccatcatccatccatcaatgctgtatccattcctccatcaattctccatccatctatccatcgtctatccatcaatcctctgtccattccatctatccatctatcctctatccatccatccatcatccgtctatcctctatccatgaattattcatccatcaatccatcctctattcatccatctatcctctactcatccgtccatcattcacccattcatctacccacccatccatccatccgtccattcatccatgaacccatcctctatccatttattcattcatccatccatccaccttccacctaccatccatccatctctctccctccctcccatgtgtatcaggaccttggaataggctttggaaattcaaagatgattagggcaggccctccactctccagaaactcatggtcttatggggatttcagacatagaaactattttaacagtaacatggcctgagtatggagtcagaaaggttccaagtattctgggaacacagcgtttttgtttggagacacctggacaacaagtggaaacaaatgtatatcttcttcatcccaacatgggcatctgttacacccagaagagtatgtaagaagcacagggtttttatttcaaaaatccttttattgacatatgatttacatggagaaaattgtgtatgccatagcgtgcagtgcaaagaattattataaactgaacacgtctgtgtaactagaatccattttaaataagacaatgccaccagccccatggaagctcccacatgcaccttctaagaacttccctcaattaaggataatcattatcctgacttctaacagcatcgattagttttgcctcttcttgaatggacggtctatatatggacttagacagtatgttcttgtttccatctgtcctcttttgttcggtatttgtgtctggaagatatgtcagggttttttttttgttttagagacaggatctccctacattgcccaggctgtatcaagctcctggcttcaagcagttctcccacctcagcctcccaaagtgctggggtcgcaggcatgagtcactatgctggccccaatacatcagttttgatttgtggtagttgtagctcattcattctcactgttctgtggcaggggttgctaacacatttttctgtaaagggtcagatagtaaattctttagcctttgtaggccagacgatctttgttgcaactcattaactctgccagtgtagcatgcaaatagttacagacaatatgtaaatgaatgagtatagctgttttccactaaaactttatgtataatagcaagcagtgggccagatttggtccatgggctgtaatttgccagtccctgctgcgtggcattccattgtaatgcaaggttttaagcaaccatatgaaaatattgagctcagaatctagtttcttcagaggaaagatgtaagctggctctgggtccccagtggctttaggctccaaaactccagggtaccttggcattgacctttgtgtctgctctgcccttctctccccacctcagccatattgaaggtggtatcatcggtcctgcagcttggaaatatcgtcttcaagaaggaaagaaacacagaccaggcgtccatgccagataacacaggtacttgccactttttcctgatgaccaatgactttggggttgggggggtgggggaggtgacatttaaccactggttatttttcaaggtgaaggtatctgggattttaacaacagttggactaggttcttatcactcactttttcaaacttttcagtgctcaagaccctatgtggaaagttattgaatcagagcgcagggattaaaaaaaaacaaacctaatagttttatttatttgttcttttttttaaatacaaaattttacaagttttaatagagacgaggtctcgctgtgttgcccaagctgatcttgaactcctgagctcaagtgatcctcccaccttggcctcccaaaatgctgggattacaggcaagagtcatcacgtcctacccctaatagtgaccagacaagatcccgagggaccatctcttctaaaataccccacttaattgttttgttaaagaaatatttctcaagcccctgcaatatgccactgggatacagcaggaaatgacacaagaatagctcttcttacggtatctgtggtcgtcttggggagacagacctcaattgccctgagaattaggggtgccagataaaatacaggatgtccagataaatttcaattttaggtaaacaacaaacctttttttaaattttaattatgtcccttgtaacatttggaccgtgattataccaaaagagtattcttgtttatctgaaattcaggtttaactgagcatcctgtaattttccccctaaatctgataaacctacccacaaataaacagtattttgtgttttgagaagctggcctggctaccactatgcttgttggtggctgagctgagagcaaaacttaggtttcttatttcccagcccaggctgtatattgtgttgctttttcccgctccctagagcccaccttgatcaaacctgttgcaaccgcttactgggtttaccttgcccacagcctagacagagccaattaatcaagacaggggaattgcgatagagtaagagtaactcacgcagagccggctgcatgggagaacagagttttattattactcaaatcaatctccttgagcattcgtggatcagagtttttaagcataatgtggttagggggaggccagtgagttgggggtgctgattggttgggtcagagatgaaattacagggagtcgaagctgtcctcttgccctgagtcagttcctggacagaggccataagatcagatgagccagtttctcgatctgggtggtgtcagctgatccacctggtgccagggtccgcaaaaatatctcaagtactggtcttaggttttacaatagtgatgttatccccaggagcaatttagggagggtcagactcttgtagcctccagttacaggactcctaaaccataatttcaaacctttgggctaatttgttattcctacaaaggcagtctagtctccaggcaagaagggggtttgttttgggaaagggttcttgtgttttaaactataaactaagaggctaggcgtggtggctcatgcctgtaatcctaggattttgggaggcccaggcaggtggatcacttgaagtcaggagttcaagaccagcctcgccaacatggtgaaaccccatctctactaaaaatacaaaaattagccaggcgtagtggcaggcgcctgtaatcccagctactcaggaggctgaggcaggagaactgcttgaacgcaggaggcggagattgcagtgcgccgagattgtgccactgcactccagcctgggtaacagagtgagactctgtgtccaaaacataaaaaataaactataaactaagttcctgccaagttaattcggcttacacccacaaatggttcagtggagcttggaggttagaagcaaggtggagtccgttaggtcagatcttgttcagtgtctcagttataattttgcagtggcagtttcattctcaggtgtttgttatgtattagagtccctaaatctggcaaattaatggaatccggatgccaaggaaagacctcagggaaagagaaatgaaaaagtgctcttgccaagagatggggaaaaaaaaatcctaaaatcactctatttactctgccttgcacatgcaaagcagcatgtaatgctattttcatgttaagggaccagctcgtggtcacaccactgcacttcagcccgggcgacaggaagactgcatctcaaaataaaagaagagcatttaggttgactctagcattttgctattgcaaacaatgctgcaacacatatcctagaagggtgaaagaaatatttattgaacagtaactgttcaataaatgttactattaataactatttaatacttactaagtaactgttaaataaatctcaagggccagtggctcacgcctgtaatcccagcacttagggaggccgaggtgggcggattgcctgagttcaggacttcgagaccagcctgggcaacacggtgtaactccatctcaactaaaatacaaaagaaattagctgggtgtggtggcaggcacctataatgccagctactcgggaggctgaggcaggagaattgcttgaacccggaaggcggaggttgcagtgagctgagatcgcgccactgcactccagcctgggcgacagagcgagactctgtctccaaaaataaataaataaataaacaaataaataaataaataaatctatctatctcagggactttacatactttaccttatttagtcctgggtaccaacaaggtaccgaagagctgaccctttttaaagctgagaaaagcaagatgctgggagggtaaagagcttttccaaagtcacatgacttggaagtgtgaagggacagggacttgaaactagaactacctgaccctaaacccccaactggggcctgcttcagcccaccccaatcattgcctctcagcaaaatactggggagtgtgaccactaatgacagcagcctttaggacacttcaagctatattcatggtcagcgggtcccatttccccaagagaacccgctgtattcacagatcacaaatatcccatgcgatgtgtcttcttgccaagctatttcttttgtgatgcactcacgatgtttcttttctccatccagctgctcagaaagtttgccacctcatgggaattaatgtgacagatttcaccagatccatcctcactcctcgtatcaaggttgggcgagatgtggtacagaaagctcagacaaaagaacaggtaatgatgtacttatcacttatccatccatgcacccacccatccatccattcatccatctatccacctgttcactcattcatgtattcattaatccattcacccatggtctgcctctgcatctgtccatccatccatctttctacccactcattcatctgtctgttcatccatccatccatccatccattcatctgcccatctatctgctcacccatcatctctccatccctcactcatccatctgtccatccatccatgacccagccatctgtccatctgtccgtccatccatcacccatccagctgtcattccattcattcattcattcattcatctgtccatgcatccacccatccatctctttatccctcatttattcaatactagaatattcacagtcccatgtcaggttttgtttgtttgtttgttttttgtttttgagccagagccttgctctgttgcccaggggggggtgcagtggtgccatcgcagctcactgtagcctctgcctcccagattcaaacgattctcctgcctcagtcccccaagcagctgggactacaggcatgcaccacaacgcctggctaatttttgtatttttagtagagaagggtttttgccttgttggtcaggctggtcttgaactcccgacctcaagtgacccacctgcctcggcctcccaaagtgctgggattacagtgtgagtcactgcacccggccaagaataaaaatcttcaccaccagcctggcttatgtgaaaatggagcccattgagaataaccgggttcccctggttgccctctgcaggctgactttgctgtagaggctttggccaaggcaacatatgagcgccttttccgctggatactcacccgcgtgaacaaagccctggacaagacccatcggcaaggggcttccttcctggggatcctggatatagctggatttgagatctttgaggtacagctcggtgggatcctaagagccatggtcttggttgtctgagatgggctttttcttggaggagtcatgattttggagaaaggcatgtagatggctactgtagggtaggaggctgtctagttaagggtggatcattgagggtataagagacagaaatccaacaggaaatgcattggtttctggaactgagaaggccagacatgtagctggatcccgtaggcagggtctgatctcccgccatcgttctctctctctctctgccttcctccatattggctccattctcaagcaggctctcccctcacgggggcaagatggctgccacagctccagactgcctctcagtaatcctggtaaaaaaaaaaaaaaaaaaaaagcacatatctcttttctaacagttccaaccaaaatcttggaattaagtctcactgactcttactcacctgaattgggctacatggtcacctccaagccaagaactgtttgcaggagcttgcaatacctcatgtagtagaaacatggatattggatcctttacccatgggtttgaagaaagttctcagagaaagggaaggttttttttttgtcttgtcttgtttttttttttttgagacagagtcttgctctgtcgcccagactggaatgcagtgtcacaattttgtctcactgctgcctccgcctcctgggttcaagcaattctcttgtctcagcctcctgagtagctgggactacaggagtgtaccactgtgcccagctaattttttttttttttttagacagagtctcgctctgttgcccaggccggagtgcagtagtgcaatcttggctcaccgcaacctccgcctcccaggttcaagtgattctcctgcctcagcctctcgagtagctgggattagtgccaccatgcctggctacttttttttttttttttggtagagacagagtttcaccctgttggccaggctagtctcaaactcctgatctcaaatgatccaccagcctcggcctcccaaagtgctgggattacaggtatgagccactgtgcttggccaatttttgtatttttagtggagagaggtttcgctatgcttgccaggctggtcgcaaactcctgacctcaagtgatcctcccgccttggcctccctaagtgctgggattacaatcatgagcactacacccagccaggaggttttaagattgatagatgtcccgaaagaagtgtactaccgagtcactttctctctgcgcctctgttttcacatctgtaaaatgtttccacatctgtacatgcagtagcgtgccttacgaggtttgtccatccatagatggttgtgcagatggaggagataagcatctttaaggtgtgtgagggccatgtgatatcaacttcaccagccctggtggactctaggcagcatgttttggggcctcagccctgtctgggtgctgggatggcagaacaggatgtgggcgggccatgggggcgctgtcgggtggagcttctgtggggctccttgtcttctgacttcataccaagatgctcacgccccgcccccacgccatgtgctcaggtgaactccttcgagcagctgtgcatcaactacaccaacgagaagctgcagcagctcttcaaccacaccatgttcatcctggagcaggaggagtaccagcgcgagggcatcgagtggaacttcatcgactttgggctggacctacagccctgcatcgagctcatcgagcgaccggtgaggggcacgtgggcgtgcggggctccgtcacaccttgtacacgtgtgtggcctctgtggagccgacgtggaccccacactctccccatgcacatagcattcccccacccaatccatcacccagtcctgaaaggctgtaagctgaatccttgtgaactcttacaatttccattaacccacattttcatatcaaaggtattttctttaatttctgccttccttccatcctcttttttcttcctttttttcttccctaccctctttcccttccctttccttctctgccattgctttttttttttttttttttttttttatgacatggtctgactctgttgcccaggctggagtgcagtggcacaatcttgcctcactgcaacctccacctccctgcctcaagtgatcctcccgcctcagcctcccaagtggctgagactacaggcgtgcaccaccacgcccacctaacttttgtattttcagtagagacagggtttctactaattagccgggcctggtggtgcacgcctgtggtcccagctatttgggaggctgaggtgggaggattgcttgagccctggaggcagaggttgctgtaagccgagattgcgccactgcattccagcctggataacagagtgagaccctgtctccaaaaaaaacttttctaacaggaaccctaggtgaattcaagtcaagcaacaaattcatttgcaagaattatgaactcggccgggcgcggtggctcatgcctgtaatcccagcactttgggaggccgaggcgggcggatcacgaggtcaggagatggagaccatcctggctaacacggtgaaaccccgcctctactaaaaatagaaaaaatcagccgggcgccgtggcaggcgcctgtagtcccagctactcgggaggctgaggcaggagaatggcgtgaacccaggaagcggagcttgcagtgagtcgagatcgcgccactgcaccgtctgcctgggcgacaaggcaaaactctgtctcaaaaaaaaaaaaaaaaaaaaaagagttatgaactcttcatgatgttgcctgcgtgttgcccactagggggcggcagcaaacattatgttctgccttccatccctgttactggtccattgggcacagggtaatttgaaggtagatttggaagcatgggggtcataaactcatctttatatgtgggcaaatacagtatcagatctcggcggatgcccatgcgttgtgtatagttggccagctcttcatggaatgcctgaggttgggtgttctctctgattcaagccctacttgtctcccacagaacaaccctccaggtgtgctggccctgctggacgaggaatgctggttccccaaagccacggacaagtctttcgtggagaagctgtgcacggagcagggcagccaccccaagttccagaagcccaagcagctcaaggacaagactgagttctccatcatccattatgctgggaaggtaccagccacagggcccaggggactctgtctcaggggacccccagtggctgctcagcgcagagacagtctgagagtggcagaaccttgggctgcctggaaactgcaaagccatctgctgctaagcgaatcccaaccaagtcctattcgtaatttgtctacgcatctgtaaggcatcagctgtagccactctcatgttttccaaccgtgacgtccagacagttatttctttctgtttttgttggagacagggtctcgctttgtcgcccaggctggagtgcagtggtgcgatcatagctcactacagcctcaacctcctgggctcacacgatcctcctgcctcagcttcccaagtagctgggactacaggtgtacaccaccatgcccagctaaaatcttttttcctttttgagatggaattttgctcttgtcatccaggctggagtgcaatggcgtgatctctgctaactgcaacctctccctccgggttcaagagattctcctgcctcagcctcccaaatagctgggattacaggcacctgccaccacacccagctaatttttgtatttttagtagagaagggtttcgccatgttggccaggctggtctcaaactcctgacctcaggtgatccacccgcctcggcctcccaaggtgctaggattacaggcatgagccaccgtgcctggccgcccagctaaatttttaaattatgtatagatatggggtcttgctgtgttgcccaggctggtcttgaattcctgggctcaagagatctccctgcctcggcttcctgaagtgctgggattatgagcacgagccactgtacctggcctcagcctgcttttcttgtatagactctaaatccttcctgctacaagttatacccaacaggcggggccaactggaatggggtgactaatacatccacacctggcttcaacaaaaatctcccatgtcacggtcttgagtttgctattgccagcctgctctggccagggaaatctatgatagttgtattcatcatcatcatcatcatcatcaacatgccttggctgttattgtataggcccttgccctgtggctctcaagagtcctggataatgtacaaaggacatagcttagtctggcttgcagaattgtagtattctattgactcctcagtacctccactgcatcatgggcacaaacaatgctctctaccagggcctggcaacagagtccgatctggcccacagcttgttattgtaaataaagttttattggaacacagccatgcccatttgtatgcataatgtctatggctggctgcttttgtatactacagtgctagagttgagtagctgcgacaaagactgtatgacttggctgggtgtggtggctcacgcctgtaaccccagcaccaaggcaggtggattacttgaggtcagcagtttgagaccagcctggccaacatggcgaaagcccgtctctgctaaaaataaaaaataaaaaaaatttaaaaattagccagctgtgagattacaggcacacaactgtaacctcagctactcaggaggctgaggcaagagaactgcttgacccaggaagttggaggttgcagtgagctgagactgcaccactgcactccagactgggcaacagagaaccactctgtctcaaaaaccaaaacaaacaaacaaacaaaacattgtatgacttgccaagccaaaaatatctactatctgggccttcaccaaaagtttcccaactcctagcctatattcaagggggtatatgttcctttaagcatatagagacaacacttttcttttccctacttcatcagtggattttttttattattattttcagtcttctctcagatcaagcctacctattatcctgataacccacatcccatgataacccagcaaagctgtattatcagttcctttcatttaatattcaccatagtaaaaattacggctttgggcattgtcattgtttgagtcaggaatgtaaaaagcctatatgtcctttttctgtatatccatatatcaggatctctgagttacaaattatgctcattagagagtggaaaataggatgccatgcttaattaatttatttatttaattattttgagacagagtctcactctgtcacccaggctggagttcagtggcgcaatctcagctcactgcaatctccgcctcccaggctgaagcgattctcctgcctcagcctcccgagtagctggcattacaggtgtgcaccaccatgcctggctaattttttttttttttttgtatttttagtagacatggggtttcaccatgttggtcaggttggtcttgaacgcctgacctcaaatgatccacccaccttggccttccacagtgctgggattaccagtgtgaaccaccacgcttggctgccatgcttaatttctaaaccaggatgattgggaagatgatgaggggggagttttgcatgtcggcaggagggcatctgccgtcatgaaatctcttaatagtgtataactcacaggtactgtgctggcttaggaggagggaggctaccacagcagcgttagtaggagaatatggaatggaaactaggctttcccagcaatggctatcactggctgatgtcctactacgtgggcacaggtccctgggctgttggtctcttcactggtgtttgtggagtcccatcatggtggtcataaacgtcatttcctctctgacctcagaagatctggaaggacaatgggagggctggggtcctggccttggtttctaagtttctagtttcccaggggttctgaccagcagggtgtccttggcaggtggactataatgcgagtgcctggctgaccaagaatatggacccgctgaatgacaacgtgacttccctgctcaatgcctcctccgacaagtttgtggccgacctgtggaaggacggtaaggccttctctgctcgggtccatgttctgctttgagctggagaattgaacacccaagtcccccgactctcacacctgccccaggaggggaggcctttacatgggggcaggggaaggaagagcattggcatgggctggtgatgtctcgttgaaacaatttcttcctgagtgggggtccctgagcccctcaatcctacatgtcccgaggggattgaggtcctgaggtcagggctcaggcaatagaggagaaacagcatgccaggcacggggagttagactgccctgtccagagtcagaaggacttcactgtatcttgtctctgccacctcctagctctgtggtcttggatgagtcacttgatgtcattaagcttcattgtcctcattagtaaaacaggagatgcaataatagttgccgtctctactagaggtattatgagggttaaattagaccagtgatgctcaaactcaagcaggcatcatgaccccctggaaggctttgtttatttatttagggacagagtcttgctttgtcacccaggctggagggcggtggtgcaatcttggctcactgcagcctccaccttctgggttccagtgattttcctgcctcagcctcccaagtagctagcattacaggcacacaccaccatacctggctaatttttgtatttttagtagagacggggttcccccatgttggccaggctggtctcaaactcctgacctcaggtgatccgcccacctcagcctcaaaaagtgctgggattacaggtgtgagccactgcacctggccctctttggagggctttttaaaacccagatggctgggcctaccctaagatctaattctgcaggtctggggccagggatggggcgggcctgaaaacattcatcccaggtgatgctgctggtctagggaccacactccggctccctttgagaaccagtgaatagatgatccctgtgaagagctgctggagtgatgatgaggggagggggtttgctgtttgtccctggccatcagtgtccacagcaggttttattcttggcacagggcccatgggcctggggcttacaggactggtctccccttgttttaagcatgctaaaaaaagggctccaggaggggccagctgtgccctaaccatatgccaggctctgggcctagggaacaacatcgcaccctgggtctgtgtcatcccaggacacatgatgaagcctgtagtccctcctctgcgggacccacagtcttgtgggagagatgagactctcaaagacaagcagagagacaagcatgaggctgcgcatggtggctcacacctgtaatctcagcactttgggaggctgaggcaggaggatcagttgaggtcaagagttcgagaccagtctggccaacgtggcgaaaccccatctctactaaaaatacaaaaactaactgggcgtggtggtggtaatcccagctactcgggaggctgaggcaggagaactgcttgaacctgggaggcgcaggttgcagtgagctgagattgtgccattggactccagcctgggcaaaagagcaagactctgtcttgaaaaaataaaactaaaaataaaaaataaaaacaaaattagccgggtgtgctggtgggtgcctgtaatcccagctactcaggaggctaaggcaggagaatcacctgaacctgggtggtgaaggttgcagtgagccaagatcgtgccactgctctccagctgggcgacagagtgagagcttgtctcaaaaaaaaaaaaaaaaaaaaaagattgttacacagaatctgagtagaaggtgaagaaatggtgccatccatggcctgtgggttgggcttggcatgtgcaggacctgctgggctggtagaaaaagaaccttggaggtgatgatgatgatgatgatgatgatgatgatgatggccgggcgcggtagctcacgcctgtaatcccagcacattgggaggccaaggcaggggaatcacctgaggtcaggagttcgagaccagcctgaccaacatggagaaactctgtctctactaaaaatataaaaaaaatgagccgggcgtggtggcgcatgcctgtaatcccagctactgggaggctgaggcgggagaattgctggaacccgggaggcggacgttgtggtgagccgagatcacgccattgcactccagcctggccaacaagagtgaaactccgtctcaataaaataaaataatgataataataataataataataataataataataataataatacctactttttgttgagcacttactgatgtgccaggctatctcggagtgtgtgctgtatcttctgcctcagaatatttcttccgtggatacctacatggttacccactcatttcttgctggtttctgctcaaatatcaacttagcagagcccaccacctccttgtctaagagagcaccctcttcactctctctccgctttaccctatttttatttttctacgcacacctcactactcaagatattccatacttaacatctgtgatctctgtctgtctccttccctgtgatataagcggggtgagggggccgggtctttttttgttcacagcagtgtccccagggcctggagcacagaaggtcctcaataactatttgttggtggatgaaagattggaggctggcagggaataagtgccttctgtgccttatttttttttacccctgccctagaaggtagacggtattattacctcccttttgtagaaagggagactgaggcacaggatagtgccaagccaaggctagtcagtgagtggacagcgagagcaggcttgactcctaggtcagcgtgactccatcacagggaatttgttctttctgccactcaggtgctctcaggatttccccaatagacaatacttggaaaccctgactgccgaaggaggcgttggtgatggaaggaaagattggagtgggcaggttggtgggtggggctggggctgagcctctggcctatttaggggtgggtgggccagaggctgatgccaccctggctgtgccccatagtggaccgcatcgtgggcctggaccagatggccaagatgacggagagctcgctgcccagcgcctccaagaccaagaagggcatgttccgcacagtggggcagctgtacaaggagcagctgggcaagctgatgaccacgctacgcaacaccacgcccaacttcgtgcgctgcatcatccccaaccacgagaagagggtgaggcccgccgcccagaccctggggctcccagaagccagggctgtcccaagcggtcacagcgtccccagggcgccctctgcccccacctaccccgaggaccccattttccatgtggggaaggctatctgaatctcagacccattccccatccctggaggaaaaggaggaagggaggatgcatccagagacttttcagttgtggagttgctgtgcaggtcatccagccactcattcattcattatcccaggaagtattcactgggctctgccctgtcctgggtgctggggagcagtgttagaaaaattgtagcccttccctgtgggtttctcataatctggtgcaggcatcttcagcttggggcgattgtgtcctctatatggacatgctacagacatttttggttgtcacaaccaggagggggctgttagtcagcatctagtgggtaggggccagggatgccctaagcattgtacaatgcacaggatggtccctcaacccccagcacagaatccctacaagatgccagtagtgctgaggttatgggagacacggggagaggtaaacatacagctgatgatggtgatggaatgtggtcagttaggagaacaccaaagagccagggctcctcccacagcctcaggactcagagaaagcttctggtgaacttgaacgttaagaatgtgtggccatcaacttggtgacatggaaggcagggtggggcctaggataagcagggggcctaggataagcagagggcccaggctaagcaagagtgtggaggtgagaagtgaaggaactaggtaagaaaatgctagatagtgtccaggcgtgttgctcacgcctgtaatcccagctactcaggaggctgagaaacaaaaatctgttgaacccaggaggcggaggttgcagtgagctgagattgcaccacagcattccagcctgggcagcagagcgagactccatcttaaaaaaaaaaaaaaaaaaggaaagaaaatgctaaataggtcatttcatgttgcaaatgtgtgatggcatgaggtaggaatcagatggtgtgaggtaggattgaggctgaatgggtaggcaggggctagatcgtggtgctccttgtgttctttctggagcttggccttctctctctaggcatgccattgggggtgttaaagcagggctatatcatggtcagatttacattttaggaagtgaatgagggggctgggcatatgctagctcatgcctataatcccaacactttgggaggttgaggtgggaggatcacttgagaccaggtgttcaaggctagcctgggcaacatagcaagaccctatatctacaaaaacatttttaaaaattttccaggcatggtagcacatacctgtggtcccaaatacttgggaggctgatttgggaggatcacttgagcccaggagtttgaggctgcagtgagccatgatcgcaccactggactccagcctggctgacagaatgggaccctatctcaaaaaataaaaaggacaaagggattgaggggagaggcaagaccagagagagagaccaggtgggtggtttctgtggttgtccaggcaggagaagatagtggagacaatggtggtgaagagaagtgggggggttgggagatatttgggagctagaagcaatcaaactgctgatggacaggaagtgagggagacgaggtgatgaggaggaagccccaggttccagccaggcgatgctagtgtcaccaagaaccagagagatcatgaggcagccattgccgaagcaaagagatgaaaacccagaggggggcactgctttgcccctcggccctcagctaagccctccttgggtgcttctgttggtaccctcatggcctggccaggtgggtcatccaggtaggaggtttggggctttgctgcgccatggtttctggccccagggatccactgccctctttgacctttgcagtccggcaagctggatgcgttcctggtgctggagcagctgcggtgcaatggggtgctggaaggcattcgcatctgccggcagggcttccccaaccggatcgtcttccaggagttccgccaacggtaagtcccaaggtctggcccaggtagggcagggggtgagcgggactgggtggaggaatggatgctggaggtacccggggtgacttctgctctgtgtttcaagctacgagatcctggcggcgaatgccatccccaaaggcttcatggacgggaagcaggcctgcattctcatggtgagcccagaagtccaccagagacctcccaacctctggccgcaagccacctgctgctcttggtgggaccgttcttacccatgtcatcactggccaaatggcacagtggaaatcaggagctcttcctttccttccttttgcagatcaaagccctggaacttgaccccaacttatacaggatagggcagagcaaaatcttcttccgaactggcgtcctggcccacctagaggaggagcgagatttgaagatcaccgatgtcatcatggccttccaggcgatgtgtcgtggctacttggccagaaagtaaagatgctttcctgcatcctaatacctcaaacgcgaatcacaaacaggggcctttctgttctgattccctgattctaagaggccacctgtttaagatgcatcattgactgaatgacagccttttcttgaaggggaagaaatgcttctactttaaataaatgtaccaagttacgagtgcaggaagggaacgagttttagacctgggttctcatcgtggatgccccagtttttgctgatgaaccttgggcaagttactctacctctctgagcttccagttttttagctggaaactgagcataatcattttgacctcagagagctgttcatgaggtgtcactaagataacgcatgacgagagcttagaacagtgcgtggttctcaggtcagaaatgattgttgttgtttttacctccctccctcactccttccttccctccctcccttccttccttcctttcttcttcctttttgagacagagtctctctctctctctctgtcgcccaggctggagtgcagtggcgcagtctcaactcactgcaacctctgcctcttggactcaagcaattctcgtgtctgagcctcccgagtggctggaattagaggcgcccaccaccacactggcctaatttttgtatttttagtagagacaaagtttcaccatgttggccaggctggtctcaaattcctggtctcaagtgatccacctgccttggcctcccaaagtgctgggattataggcatgacccactgcgcccagcctagacatgttagaattggataaaccattgaggaaagaggacttgacggtgtctagatccccgtgtcccagtgggatttataaggcagggttttggagggtgtgatgtcccagctgttctgtgaagactgggagccggggaagggttcgggttccttaatgaaagtcataccccagggactgcagggacaggtggggtcgctctctgtctggggtgtgtgttgtcattgggcagagaccacaccctcaccagtaggaccctgatgtgtcaggttcattcattgacacatggacccaagatggtcaaggccagctttgggagctcttggccctcccgcaacagacctaacttgtcaagtttcgttactaagttccctgttgctgtccttcctggataactggggcaattttattcttaaagttttcctgtgtccaagatggcagccaagcagggaagacagaattacgttcactgttctatcgtttctcaatctatcgatagcccttaaacgggaagagtgctggttcagggtcacagtgtgaaattcctaaaacaacccaggagagaataggtttgacagggctgggtgtggtagctgacacctgtaatcccaggcactttgggaggccgaggcaggaggattgcttgagcccaggagtttgagaccagcctgggcaacatggcgagacccctatctctaccaaaaaaaaaaaactttaaaaattagctgggcatggtagcatgtgcccgtagtcccaactacttgggaggctgaggcaggaggatcatttaagcccaggaatttgaggctgcagtgagccatcatcacaccactgcactccagcctgggccgcagagccagaccctgtctctgaaaataaacaaataaataaataagttagtcagaaacagctggtgtaggctgggcatggtggctcctacctgtaatcccagcactttgggaggccaaggtgggtggatcacctgaggtcaggagtttgagacccacctggccaacatgggaaaccccatctctactaaaaatacaaaaattagccaggcatggttgtgggcacctgtaatccaagctactcaggaggctgaagcaggagaatcacttgaaccccggaggtggagtttgcagtgagctgagatcgtgccaccgcactccagcctgggcaacaagagcgaaactctatctcaaaaaaaaaaaaaaaaaaaaaagaaagaaagaaaaaagaaacagctagtgcagctggggagtacgggagcccccttaggaatgatgcacatagttgtgttttctgagtggtgtttggatctcagctaagtccagggcatgttgtgagccctgggtcttccttgtccactgaaaaaggctctgtcctgtagatgatttaagttgtttgcagccagacaacacatgtgtcacacagggtttctggaagaacctgagttggggagattggggcatgtccctgtgcaggttcaggatgctgcagggcagggctctgttgacagcagggtgtggcttcatgacccccgcaccttctcttcccccctccctagggcttttgccaagaggcagcagcagctgaccgccatgaaggtgattcagaggaactgcgccgcctacctcaagctgcggaactggcagtggtggaggcttttcaccaaagtgagtgctctgccccagcccccttcccaggggcccccagccctgcttcttcactctggagccttcacatttgggacaggaggtggtcgcaagtgggtgtggaatggagggctcgaactcagaccttgagcattggcggttctctggcccgaggaggccctgtcctttggcacataggctatagccaggaccttaacacaaagtattaatatttccatccgcactggaatccctcgtgtggcccatttatagccacacccacttcctccgtagccatggaaaccactctgttctccagttctgtaattttgatggttcaagaatgctgccgggggcggcggctcacgcctgtaatcccagcactttgggaggccgaggcaggcggatcacttgcggtcaggagttcaaaaccagcctggccaacatggcaaaaccctgtctctacttaaaatacaaaaattagctgggtatggtggcaggcacctgtaatcccagatactcaggaggctaaggcaggagaatctcttgaactcaggagacagaggttgcagtgagccaagatcatgcctgcactccagcctgggtgaaagattgagactctgtctcttctttctttttttttttatttaaaaaaaaggccaggcacggtggctcacggctgtaatcccagcactttgggaggccgaggcgggtggatcacaaagtcaagaaatcaagaccatcctggccaagatggtgaaaccctgtctctactaaatgtacaaaaattagctgggcgtggtggcaaacgcctgtagtcacagctactcaggaggctgaggcaagagaatcacttgaacctgggaggcagaggttgcagagagctgagatcgcgccactgtactgcactccagcctggtgacagagcgagactccgtctcaaaaaaaaataaaacaaatattctatacatggaattagagagcatccagactgttgcatgtatcaatactgcaggtttttttttttttactttttgcattttttgaaatggagtctcactctgttacccaggctggtcttgaactcctgacctcaagcaaccctcctgcttcaggctcccaaagtgctgggattacaggcatgagccacctcatctggccatagcatattattttttatttctggcagagtcagggcctccagaggactcaactggttcctgtagtggcactggttgcattgtccccatggcacaaagacatgctctgttgcaatagactaggcttctccttatatgcccttgagtgtatccactggtgcaaggctttttcaccaagcaaacagacattgagtgcctgctgtatcccaggcacatgctaggtgctgggggtgcagctgtgaacacacaccatggtccctgacctccatgaatattctagccgaattggtggggagtaaacaataaacagataatcacagagacagatacataatggcaaactgtgataagtgcatgaagcaagctgctggagtacatagcaggggcttccttgtgccaggcaggggcttgaaaacaaagagttaggaggcagcccagggaaggacagcagatgctgctttttggaaatgttcgtccccactgaaccaacttctgaaaaactatcctaagaaaatcgtcttagccaggtgtggtggctcatgcctgtaatcccagcactttgggtggccaaggcaggaggatcacctgggttcacgagttcgaaaccagcctggccaacatggcgaaaccctatctctactgaaaatacaaaaattagccaggtgtggtggtgggcacctgtaatcccagctactcaggagattgaggcaggagaatcacttgaaccgaggaggcagaggtttcagtgagctgagatcgtgccactgcactccagcctgggtgacagggcgagactccacctgaaaaagagaaaagaaaatcaagagttaagggcattcattatggccttatttacaatagcagaatttcagtgtccagtcctagctgaatgatgagttcaataatggttcatctatcaatggaatgttttcagctattaaaatgatggctttggctactgaataggtctgctaaaaaaaaaaaaaaaaaagacttctacctagctgtctagttggacactgtggcatgtgcctgtagtcccagctactctggagctggggtgggaggatcgcttgaggccaggagttcaaggctgcagtgagctatgattgtgtcactgcactccagcctgggtgacaaaacaagaccatcgctaaataaataaattaacttaaaagatggctatgtaaagttgtaagaatgatgtaacagcatggggtaatacatatcttataatttttaaaaaaattttatttgtggagacagggtctcactgtgtcacccaggctggagtgcagtggcacaatcgtggctcactgcagcctcagcctgcagggttcaagcgatcttcctgcctcagacccctcactagctgggactacaggcacacaccaccatgcctggttacttgtttttgtagagatggggtctcatgatgttgcccaggctggtcccaaactcctgggctcaagcgcttgcctcggcctcccaaaatgctgggattacaggcatgcatcactgttcctgtctgtatcatataattttaaataataaaagcagcctctacaactaggcagcatggtcttaagtctattttttaaacatagaaaaagagccaggaaggaaatgtaaacaatgttaataatgactttgatagggaggtgggtgggatatgaaagattttttttctcccttttgtccttggaaggaaatatcacttttcagcagtagttctctgttgggatggttctaaagtggggaagatgagactttttcctttcactttgtaccttttctggtgctctgatttagagctcctcagtcttgccactgttgatattttggggtgactaattctgttgtgggggctgtcctgtgcactgtagggtgtttagcagtatccctggcctctacccactggatgccagaggcaccccccaccccagctgtgacaatcagcagtgtctccagacaatatcccctagtggggatcggtgggggcaacattgtccctggctcggaaccactgatcgaatttattatgacaacatatccctttgccacaaaaacaaatgatgggctaaccgtgtgtgtgcaggtgaagccactgctgcaggtgacacggcaggaggaggagatgcaggccaaggaggatgaactgcagaagaccaaggagcggcagcagaaggcagagaatgagcttaaggagctggaacagaagcactcgcaggtacctgtatggatgcatggctggggttgctggggaacaggacttggccccgtggggctcacccgcctcctccccaccacctgcgtgcagctgaccgaggagaagaacctgctacaggaacagctgcaggcagagacagagctgtatgcagaggctgaggagatgcgggtgcggctggcggccaagaagcaggagctggaggagatactgcatgagatggaggcccgcctggaggaggaggaagacaggggccagcagctacaggctgaaaggaagaagatggcccagcagatgctggtaaggtgtcacaggggcagcccgtggtgggtagcaaatcacttgaccctcaccacaggcctgtggaggtgcatccagggatatgtgtccctgctgggacagatgatgagacgggggcttggagagggttggtcatctgatcaaggccacacagctgggattgggactggaacacagtgagcccactctgttctattgccctgccttgcatgtgctaaccccttttctcctaacagcaagcctgaatggaggataattgtatttgttagctattgctacataacaaaacatgccaaactcagcagctaaaaataaaaagtattgcatagtcaggaatttgagagtggcttaggtgagtggttctggctgagggtccggcctgaggttgcagtcaaggtgttggctgaggctgcagtcatctgaaggctcatctggggctggaggacccacttctacttggcttattcacacagctgttggaggaggcctcagttccttatcatgaaggcctctcccctcagggctgcttgagtgtccttccaatatggcagcagagttcccccagaaggagtgatctgagagaggagaaaggaagccgcaatgccttttatagcctaatctctgaagttacattccatcacttcttcctgatttttgttgttgttgttagaagcaaatctaacccccactcaaggggaggagaattaggctccacctttttggagtcgcaaagaacttgtggatagattttaaaaccaccatggtacctactgtgctcattttatagatgaggaggttgaggttccatgaagcagagcagcttacccaggtctttattttttttttttttttgagacagagtctcactctcttgcctaggctggggtgcgatggtgcgatctcagctcactgcaacctctgcctctcgggttcaagcgattctcctgcctcagcctcccgagtagctgggattacaggagcccaccaccatgcctggctaattttttttgtatttttagtagagacggggtttcaccatgttggccaggctggtcttgaattcctgacctcaagtgatccacccacctcggcctccaaaagtgctgggattacaggtgtgagccaccacgctcaggcctttatttcttccttttaggaggctacagagttctgggcatcttcaggcctagcccctgtattcattagtccccagatcaccacgagagtaaatctgttataaccaaagctgttactcttttccctccacaacaaaggaccttgaagaacagctggaggaggaggaagctgccaggcagaagctgcaacttgagaaggtcacggctgaggccaagatcaagaaactggaggatgagatcctggtcatggatgatcagaacaataaactatcaaaagtgagtaggggccgggtgcagtggctcacgcctataatccgagcactttgggaggccaaggtatgtggatcacttgaggccaggagtttgagactagcctggccaacagggtaaaactccatctctactaaaaatacaaagattagccaggtgtggtggccagtgtctgtaatcccagccacttgggaggctgaggcaggagaatcacttgaacctgggaggtagaggttgcagtgagctgagatcgtgccactgcactgcagcctgggtgacagagtgactctgtttcaaaaaaaaaaaaaagtggaatcaagtttctgcattaaaaacaacaggcttaccaggatcagggagattttggggatttgggactttcagttctcaaagcagaaaagcccttagaaaaccaggacaagctggtcaccgtagtcagtagtcactaaccagccccacctgcttttagttctttgagctggatgtcagcttggcccctactgtgagccaggctctgtgttagatgcaggtatgcatggtgaaggaggacccttcccttgtggggtttatactgtagtgagatggcaaataatcgtcatttaccatggtgatcagggctctgaaggaaacgttcaccatattttaagagtgcggcaggccgggtgcggtggctcatgcctgcaatcccagcactttgggaggctgaggcaagtggattacctgaggtcaggagttggagaccagcctggccaacacggtaaaaccccatctctactaaaaatacaaaaaattagttgggtgtgttggcgggcgcctgtagtcccagctactcgggaggctgaggcaggagaatcacttgaacgtgggaggcagaggttgcagtgagctgagatagcaacactgcactccaccctgggcgacagagtgagactctgtctcaaaaaaaaaaaaagaatacagcagtgggggatagaggaagggtattcatagaagacttcctggaggaggtgacatttaagcagaaacttaaagatgaaggagcagttagaggggagtagaagagcatctcagctggttggcccactgtgcaaaggccctggggcagggaagagctggccagtggcaggaatggaaggagggtacctttagctgaccatacaatatgagggacaaactggcacgagatgagaaatggccagtttttggaaattgttatgggacttctctttaccatttaaaactctagttgtattttgttataatgtgggtttttctttcaactgtttacatggaaatcactaaaagtgaaacatagattctagagaaaagaaaaatcctaaagctatctctttctctttccccaaaaaggaacgaaaactccttgaggagaggattagtgacttaacgacaaatcttgcagaagaggaagaaaaggccaagaatcttaccaagctgaaaaacaagcatgaatctatgatttcagaactggaaggtaaaccagctaccaagagatttatttttattttattttattattttttttagagatgaggtcttgctctgttgcccaggctgcagtgcagtggtgcgatcatggctcactgcagcccgaaactcctaagctccagtgatcctcctgcctcagcctcctgagcagctgagactacaggcgtgcatcaccacacccagctaatttttttttattttttattttgtagagatggggtttcactatgatgctcagtctagtctcaaactcctgggcccaagcagtcctcccaccttggcctcccaaagtgctgggattataggcatgagccactattcctgggcttgaatgggtatttttaaaagcaggaaaatcagaaaggaaatttgaggatggcagatcatcccatgagtgacaactaactctatgccacctctcgaaatcacccttagtcatcacatgcactaataatatgataaaagggctgggtgcggtggctctcgcctgtaatcccagcactttgggaggccgaggtgggcggatcacgaggtcaagagttggagaccagcctggccaacatggtgaaaccctgtctcaaaatacaaaaattagccaggcgtggtggcgggcgcctgtaatcccagctactcgggaggctgaggcaggagaattgcttgaacccgggaggcggaggttgcagtgagctgagattgcgccactgcactccagcctgggcaacaagagcaaaactccatctcaactaataataatattatgacaatataaggtgctgttcatcgggagataatggtccagaccgtgactatgatggttactgattgggggatgtgttcatctcctccgggtaaaatgcctgggcaggaaggctcatttccgggcatctctctggggcctccccttcctgaagagcaccttggtttttgcagtgcggctaaagaaggaagagaagagccgacaggagctggagaagctgaaacggaagctggagggtgatgccagcgacttccacgagcagatcgctgacctccaggcgcagatcgcagagctcaagatgcagctggccaagaaggaggaggagctgcaggcggccctggccaggtagcggggctggcaaggggcatttgctgtgtgtccatgtatcccctgggcccctgctcattcgctcattcgcagtggctgtcttggtcaaggcggccccaggcccttggcatgaacttcgtttcccaggccaggcctcccacaagccttctcgaccctgttcactcccccagatcctcaccttcgactttcttctcttccctgcaaacacatcatgtctttgcagttgatctcacctactcccatggtgttgctgctgcctcttcgacatccaggcttttctcatctagacccccttctgaatttccgattgcccaatgagtcaatttccaccgtcatctcaaacacccctgtctaaggcgggaatgaccttcctttccccagcccctccctctaagggccctcttttttgtgaacaccaatctcctcctttgtttctgccgacccacagcaagcagcaaccttcagattctgccagtccttctaaatgtcccccacccatttcctctggtttttccctcttcctggctcttagctggatttacactaatgctaatactgcagcagccactatgaatgattatttacctgctcactcggtgctaagttcttttcaagcaatacctttgcagacacctggccaggtgtactgccggtgtctttgaggaggaagctgagcctcctaggggtaacgcaacaggagcaatgtcattgcttctaagaggcagagctgggatttaagcctcaaagctttctgattgatcccctggcctggctcttttgtcggccaatttgtgctatgttgacagtgctacggtgatgaagggaaagcatctctctggggcaggaacctgctcacaaaactttgctggctggatgcagtggctcacgcctgtaatctcagcactttgggaagccgaggtggggggattgcttgaggccagcagtttgagaccaacatgggcaacatagcaagaccctgtccctacaaaaagttaaaaaatgagccaggcatggtggtgtgtgcctgtagtcccagctactcaggaggctgagatgggaggatcacttgagcccaggaggttgaggctaaagtgagctatgatcatgccactgcactccagcctgggcaacagagcaagaccctgtctcaaaacaataataacaacaaaacaaaaacctaacttcactggcttactagggaaaatccagtttccttagcctcaccctcagagcccatccaccctctgcagtctcaccccaacccaactatttcactttctctcttgttgctgccctttcacaagtacagtaaaatcaaagtgcttgcctctcctgcagcattctgccatttaacagggcttcttgcagcccaccttgatctctggtcaccacctccaccagatgcagagccccagtctgaatatcccccgcaagcagtggctggccaaatgctgtgcatggggcgggtactcagtcactgagcaaatgcagaaagaacagacagttgccagggaagaagaactgtccaacattcagaaagcatctacacagtccctactgtgaccaggtaccttgccagtctggggtcaatgctttgcattcttgcacacacatgcacacacgtgcatacacacgtacacacacccatgcacatgtacaacctgttttgatgtcagaccttggcactcacatcctatgttaatctcatatagtctggcatgtcaagaagcagacctggggacatggatagaaggtgtttgatgtctctgcaacataactgtctggtcccagaaaagtttttggccacattgtaagagaggaaaccaagggacctgggggttcattctgctgggtctctccctggaaggcttgacgatgaaatcgctcagaagaacaatgccctgaagaagatccgggagctggagggccacatctcagacctccaggaggacctggactcagagcgggccgccaggaacaaggctgaaaagcagaagcgagacctcggcgaggagctggaggccctaaagacagagctggaagacacactggacagcacagccactcagcaggagctcaggtgaggggcccatcaatcccaccatcctgctatcccactgcaccaatgggatgggggcagaagaggggacaaacccaaagcaaatcgtgcatcagcccctgtgcatttaccttcctggccgcggtttgctttaacttatagaagcatggttggctgtttcttttttttctttcttttttttttttttttgaggcagtctggctttgttgcctaggctggagtgcagttgtgccatcttggctcactgcaacctccacctctgagatttaagcgattctcatgcctcagcctcctgagtagctgggattacaggtatgtgccaccacacccggctaattttttgtttttagtagagatggagttttgccatgttgcccaggctggacttgaactcctggcctcaagtgatccacccacttccgcctcccaaactgctggtattacatgtgtgagccactgcacccgaccctcatcatcttatttctcatcagaagagtagtatataccagggatgtacaatcttttggcttcccttggccacattggaagaaaaagatttgtcttgggccacacataagatacactaacactaataatagctgatcaactaaaaaaattttacaaattggaaaaaacatctcatactgttttaagaaagtttatgactctgtgtcaggctgcattcaaaaccatcctcattggtaagcttggatatactcagagaacaatttgaaaactatagaaaagcagacataaaaaaaaatcacctttagggtcgggctcacgcctataatctcagcactttgggaggccaaagacaggtggatcacttgaggtcaggagttcaagaccagcctggccaacatggtgaaaccctgtctctactataaatccaaaaattacctgggcgtggtggcgcatgcctgtaaatcccagctactcaggaggctgaggcagtagagtcacttgaatctgggaggcagaggttgcagtgagctgagatcgcaccatcgcactccagcctgggtgacacagtgagtgagactccatctcaaaaaaaaacaaaaaacaaaaaaatcacccttagtcacaccagttaacattcttgagaaattccttcctgtctgtgtgtgtatcagtcagtccccaagctccaattcccaagtatgtgtgtgtatcacttttgtgttaaattttaaaaataaaattgatcagattggttttcaattgaagattcacttcaaatgaacaaacaataacaaactgcctgccagatcacgaatcctgactctagtgaaactaggtcattgattcattcagtaaacacataaatgtattttgatgcaatctgtggtgttggcatagcatgtatcatagcatatagctatgctagctgtgccaacaccatataccctggggtttacttcccccactttgggttttgtgcagtgtcacatgcacatagagcacagcgttctgctcccttgccgcttggcctttgatacagaagagcccagtgcatgggccaggtatggtggctcatgcctgtaatcccagcactttgggaggctgaagcagacagatcacctgaggtcaggagttcgagaccagcctggccaacatcatgaaaacctgtctctactaaaaagacaaaaattagccgggcgtggtggtgggcgtcggtaatcccagctacttgggagactgaggcaggagaatcccttgaacctgggaggcagaggttgcagtgagctgacatcattccactgtactccagtctggacgacggagcaagactcgataagaaaaacaaacaaacaaaacaaaaaaccaggctgagtgcggtggctcacacctgtaatcccagcactttgggaggctgaggcgggtggatcacctgaggtcaggagttcgaaaccagcctgaccaacatgttgaaaccccatctctactaaaaatataaaattagccgggcgtggtggtgggcacctgtaatcccagctacttaggaggccgaggcaggagaatcgcttgaacccgggaggtggaggttgcagggggccaagattgcgctgtcgcactccagcctgggcaacaggagtgaaactccatctcaaaaacaaacaaacaaaaccatggactcaaggtcaaggtttagcttctaattctggctccatcacacaatggctgtgacaccatgggtaaaactgcttaccctctcttagccttagtttcctcatttgtaaaatggaaataataacacacctgcctctttgggttgctctgaggattagatgatgtatataaaaaacttagctcagggcctggcatatagtaactgctcattaaataagagccaacattaatatttaagcaaaattttgcagttcacagacatcctttcaattctattactttgtgtatttgtttgccagtcattacagatgtcctaggcaggtgatatgctccacattttgcagctgaggaaattttaggtccagagatgttaggtgaatgacccaaggtcacacagctagagaggggtggtgatgaggactgcagctctgggtcctggaagagctctcattcttttgcacggcactgagatgaccctctgtctccacccaactgccattcactgtgttcctcccaccaagggccaagagggagcaggaggtgacggtgctgaagaaggccctggatgaagagacgcggtcccatgaggctcaggtccaggagatgaggcagaaacacgcacaggcggtggaggagctcacagagcagcttgagcagttcaagagggtaatgctttttggtgatgctttttggtgatgacacataagagtgacatcagcagcctcaaattactacaggtcagggtctgcataaagacaaaaaacaagttacataagattctaatgatgatgatagcagcttatatttatttacaaaatgcttcccatacaggctgggtgaggtggctcacgcctgtaatcccagtacttggggaggctgaggcgggaggatcgcttgagctcaggagttggagaccagcctgggcaacatagtgagaccttgtttctactaaaattttaaaaaagtaggccaggcgtggtggctcaagcctgtaatcccagcactttgggaggccaaactgggtggatcacctgaggtcaggagttcgagaccagcctggccaacatggcgaaaccctatctctactacaaatacaaaaaattagccgggcgcggtggtgcatgcctgtaatcccagctactcgggaggctgaggcaggagaatcacttgaacccaggaggcagaggttgcagtgagcagagatcatgccattgcactccagcctgagcaacagagcaggattccatctcaaaaaaataaaataaaataaaatattggccaggcctggtagtgcattcctgtggtcccagctatttgggaggctgaggtgggaggatcgtttgagcctgggaggttgaggctgcagtgagccctgtcatgccactgcactctagcctggacgacacagtgagaccttaatcaaacaataaaaataggctgggcacggtggctcaccatgtctgtaatcccagcaatttgggaggcaaggcgggcaaatcacttgagctcaggagttcgagaccagcctggccaacatggtgaaaccccatctctaccaaaaatataaagaattagctgggtgtggtggcatgtgcctgtaatcttagctactcgggaggctgaggcaggacaatcacttggacccaggaggaagaggttgcagtgagctcagatcgtgctactgcactccagtctgggcgacagagtgagccgccatctcaaaaaaagaaaaaaaaaaaagaatgaatagaaatgcttctcatacagtatgtcaattaatcttcacaaccaccctgtgagacgtgtactattaaactcattttacaagcaaagaaactgaggtcctaggtgcctagaggtgaagagacttacccaaggtcacactgctggtaagtgacagagccatgatttgcacccaaacagtctggtcctagaccccactttctggcctctacaggactgaaggcctataggatgggtggggcctatcaatatactgcccttcagggataagcaaaggtgtaacaacactttcggggagatttaaatgaaacttaaaactgggatcattctatccactttaatttctctgcagactggaggaaggccaggcatggcggctcatgcctcccgtaatcctaacactttgggaggccaaggagggaggattgcttgagcccaggactttcagatcgcctgggcaacatagcgatttttcttttgtaaaaaaaaaaaagactggaggaaacttgtcattatttgatttcaatggcagaacagctctctccggcataatttgagaatgactaggtcaaatcactctcccgttgttggaactctttgcggtgtatgggagtgggagctggtaaatagcagtaccgaatgctgaatcttgggtgctcttctctcctttggggtagtgcctgtgcttcattccccagggtaagttttttagcttgcgaccttcggccagattgttttcctgaaagcctgagttacattaccctcagcgttgcagctcctccacatccccttcagtggaagcttttggttctgctagattaagtgggtgcagcattgcctaaaaattttggggaatttgcatttggttctatcactagtgtattggtccgttgttgcactgctctacagaaatacccaagattggattatttgtttattttttgagcagtggagtcttactctgtcactcaggctggagttcagtggcgtgatcttggctcactgcaacctccacctcctgggttcaaatgattctcctgcctcagcctcccaagtagctgggactacaggcacacaccaccatgcccggctaatttttttttttttttttttttttagtagagatggggttttgccatgttggccaggctgatctcgaactcctgacctcaggtgatccacctgccttggcctcccaaagtgctgagatgacaggtgtgagccactgcaccaccctgagattgggtaatttctaaagaagagaggtttaattggctcacggttctgcaggctgtacagaaagcatagcagcttctgcttctggggaggcctcaggaaacttaccatcatggtggaaggcaacggggaggcaggcatgttttacatgaccagagcaggcagaagagagagaatggggagctgccagacacttttaaacaaccagatctcatgagggcagcaccaaagggatagtgctaaaccattagaaactgcccccaaaggccgggcgcggtggctcatgcttataatcccagcactttgggaggctgagataggcggatcaccaagtcaggagttcaagactagcctgaccaacatagtgaaaccccatctctactaaaaatacataaaattaggctgggtgcagtggctcacgcctgtaatcccagcactttgggagcccgaggcaggcagatcacctgaggtcaggagtttgagaccagtctggccaacatggcaaaaccccgtctctactaaaaatacaaaaattagctggacgtggtggcggtcgcctgtaatcccagctacttgggaggctgagacatgaaaatcacttgaacccaggaggtaaaggttgcagtgagccaagattgtgccactgcaccccagcctgggcaacagagtgagactcagtttcaaaaaaaaaaaaaaaaaattatggttggaagagtgaggccccagacagaatcactgaccctccccatgcttggggttcattagacgtgaacaggagctagaagccaagcccattcccagccaggcctctttgggaagacgcagttattaagaccaccagcagacggcatgtccattactgacccgcacaaagcaggtagaggtgcaaacctctgcccatctcaggtgcagggaaacagaggcctttgcctctaacaacttgaattctgatgtagagacctggttccatctgcttgtgggggaaacgtttaacatcagctcctacctgggctccccaggccctcgtgcggtttggccccagttctggggtcttaggctgggctaaggtttctgggagcccatgtcccctagggtccccgcttcactgctttgttaccaccaagagactccctgtccccatctgaggtctggcagctcttagtcatgtcttggagggaggacgggcatccagggctgaccggtcaacgtccagcacctcccagggactatgggaagactgagtggtgggtctcgtcctctcgggatacttgcgcttctctttccccttctctacaacctggaaagaagcccctcaccgcgtcctacttttgcccaacacgcttttttttttgagacaaagtctcactctgtcgcccaggctggagtgcactggcgggatctcggctcactgcaacccccgcctcctgggttcaggcaattctcctgcttcagcctcctcagcagctgggattacaggtgactgccaccatgcccggctaatttttatatttttagtagagacggggtttcaccatgttggccaggctggtctcaaactcctgacctcaagtgacctgcctgcataggcctcccaaagtgctgggattctaggcctgagccaccgcgcctggccccaacacactttttttttcctgtagggcaactcacatgcctacaggagctggttccataaaataagtttcccttaactaggacagaagtagcagtgtcaatcacacgacacctgtgaaggacgggggcggtgaaaggtgactgccccacctgcagagccagccgctacttagatgtggcagattgttgccttgaaggaaagcaagaccctctgtttccagatctttcgttgttgttggttttttgtttttgtttttaagtttaggattactgaggcatatgtagtaaaatttatccattttactgctccattaattttaacaaatgtgtattgtgtaactaccaccaccacagtcaccacatagaatgttagttattgattgattgattgagatggagtctcactctgttacccaggctggaatgcagtggcatgatcttggttcactgcaacctccacctcccaggttcaagcaatacttgtgccttagccaccccagtagctgggactacaggcgtgcgccaccatgcccggctaatttttccatttttagtagagatgcagtttcgccatgttggccaggctggtctcgaactcctcacctcaagtgatccacctgccttggcctcccaaagctacttatttctgaaacagggtctcactttgttgcccaggctggagtgcagtggtgtgatcatagctcactgcagcctccaattcctgggctcaagcaagcctgccatccgcctcctgagtagctgggattgctggtgtgtgccccccacacccagctaatgttttattttagtagagatgggggtctcactacattgcccaggctggtcttgtactcctggccttaagcgatccttctgcctgcttcccaaagtgctggggatgacaagtatgagctgccatggcatgccttcaaacattaaagttttttgaaaaagaagctgggaatccagatttttatgtgacatttattaaaatgtcggcaactcatttttttaaaagtagtgaaagggtcaaaggggacatgtcagcaggttggataccgcttgtgggattccagattgcaacccatgagctttaggaaaatagaatccaaaatatcagctgggtgcggcagctcacgcctgtaatcccagcacttagggaggccaagatgggtggatcacttgaggtcaggagttcgagagcagcctggctaacatggtgaaacctcgtctctactaaaaatacaaaaattagtcgggcatggtggcgggcgcctgtaatcccagctacttgggcagctgaggcaggagaatagtttgaacctgggaggcggaggttgcagtgagccaagattgtgccacggcactccagcctgggtaacagagttaagactccatctcaaaaaaaaaataacaacaaaaaaaccccaaatctcttactggtgattgtgtgccccctgttgtgtgccttcctggacctctctgagggaggaaagggcagggcctgaaacgttctcccggccacagcctccctgttatccctcccctctgcttccttcgccaggccaaggcgaacctagacaagaataagcagacgctggagaaagagaacgcagacctggccggggagctgcgggtcctgggccaggccaagcaggaggtggaacataagaagaagaagctggaggcgcaggtgcaggagctgcagtccaagtgcagcgatggggagcgggcccgggcggagctcaatgacaaagtccacaagctgcaggtgaggaggtggcgcggtggtgtggtgggcagtgctgggtggtgcccagttctgtggggaggagcctcttcccggctcgctgaggtctctcttgctgcaaggcaagtcctttcctctagttgcgttcctggaggagaggcgatgatctccctgttcaattaaatattaaaaaaaccttctggccaggcacggtggctcatgcctgtaatcccagcactttgggagacagaggtgggtggatcacctgaggtcaggggtttgagaccagtctggccaacatggtgaaaagtctctactaaaaatacaaaaattagccaggcgtggtcgtgggcacctgtagtcccatctactcgggaggctgaggcaggagaatagcttgaacccaggaggcagaggttgcagtgtgcggagaccgcaccattgtactccagcctgggctaaaagggcaaaactctgtctcaggaaaaaaaaaaaaaaagaaaaaaaacccttccttttccaatttgataagtatttattgagcacctgctgtatgccaggcactgtgcttaatcctgagatccaacagcaaggaagaagagacactgtcgctgccccagtaggactccagccgagtaaggggaagggaagggaagggaaagacatgaataatcacacaaatgaatgtcaaatgatgcagcaaagggaaggcacatgatgcccaagtgtaaataaccagggggcctaacctgggggaggaggagccacgaaaggcttccctaaggagcatggataagtctaccaggcagagggaacagcgtgtgcaaaggccctgtggtaagtagaaaaattaggagagagacatacagccagtagagctggagtgcccagctggggttgggggtagggggagatagtacagagtggggttggagggggagcttgtacccagatgatgtagggcttttgagaacctattacatgtatgttgatccttactctgggcaatgtgaagctgttgaggggttttaagctgctgaatgacatggtctttttgtctttggtcttctttcacttggcatagccatttaccctgccttgccactcatggggacgtggccaaagttttcacaaatgtttaacatgtccacagccagggaccaaggggcgagggaagaattaagtgagatgtttttttctcacatgcagttgagagcagggcttttgccgccctcatataagcagtgtcaagatcattcatatcctccttgtcaatggaagagatggaggggtaggctaacagcctcaaagggacttatgcagagacactagggagtaaaagccagagaatacagagaggacgtttttacctttagggcctgcgtctctggctttggccatcagggtcaaagagtaggagtgaggaaggaagggatgggacagcatccctgggacgttcaagtaccatcctggtctcccttctccagccttagagagtggaccagccagagcacctcgtctggactctcagacctgctgctttgtctctaccaaccttggcagggatctaggatccatttagtgggatcaggtcccagtcaataccattggggctcaaataagttcttagaaccacagagtctagggccagggtcccaactcataggtgacggagttcccttcaagccacagattctgttttttttgtgtgtgtgtgtgtttttttttttttttatcagagtcccatacctcacgggtattttctcaatcagtgaacacctcaagtactagcccatgtgttttgagtaaaaagggctcctttcaacgaggatccccttctagaggctttgactaaccagtctcttggcacccttagaatgaagttgagagcgtcacagggatgcttaacgaggccgaggggaaggccattaagctggccaaggacgtggcgtccctcagttcccagctccaggacacccaggtgagtgtcctgccacatcatccaggggacctggggggtggccttcctcggggcaggtccctgggacctctttgcatcccttttgcaggagctgcttcaagaagaaacccggcagaagctcaacgtgtctacgaagctgcgccagctggaggaggagcggaacagcctgcaagaccagctggacgaggagatggaggccaagcagaacctggagcgccacatctccactctcaacatccaggtgcctgccccgtgtccttgcttccttcatgggtcctctcaacttctctgcgctgagatcccccgcaggcagatcgcggtggagtgttggtgcgatggtgcttgaccccccagcttcccctgctattgggtttctccaacgaggagacatggtcttcgcttctcagagtctgtggggccagggacaggggccactcatggtccccctctcaccctaccctggacgctgtccttgtagctctccgactcgaagaagaagctgcaggactttgccagcaccgtggaagctctggaagaggggaagaagaggttccagaaggagatcgagaacctcacccagcagtacgaggagaaggcggccgcttatgataaactggaaaagaccaagaacaggcttcagcaggagctggacgacctggttgttgatttggacaaccagcggcaactcgtgtccaacctggaaaagaagcagaggaaatttgatcaggtagagggcgtggggtgtcccccactctggccatggacgctgggttggggaatcagctctgcagagtatgacgcgtggctctggcctgtgcctgcatcccctctccactctgtggggagccatgggaggctgtcttatcttgtcttgggcgaccatggagcattaacgctaccaggtcacagtaaggatggcaaagaagccttgatgactgtgacttttctgggtaccagcaccatgagggtcacctgcacacatggtgatgccttagtttctagcctgaagaaggaatgaggtgcttatttattcactaaatgtatttactgaatacctattgagtagtattccaagtaattcagtttctatacttttaataccactcttccctaagatttcattctgtaaaattccaagtacacagcaaagttgacagaattgtacggtgaacacctttaaggccaccacctggattcagtcattgacactgtattatatgaactttatcagatacttattttgagacaggatctagctctgtcacccaggctggagtgcagtggtgtgatctcagctccccgcaacctccaccactgggttcaagcgattctcctgcttcagcctttcatgtagccgggattataggagcacaccactatgtctggctaatttttgtatttttagtagagatggggttttgccatgttgtccaggctggtctccaactcctggcctcacatgatctgcctgccttggcctcccaaagtgctgggattataggtatgagccactatgcccggcccacatatttatttataaagactaattctatctatcatgccttatctcttgggtacatttcagagcaaattacagatgtcagtacatttccccttccacacctcaacattgcatattaattagagtttatttttaaacacaattttgcttcttttggggtaaaacttacatgtgatgagattcacaaatcttaattgtacgataaatggagacccctgtatgacccaaacccctaaataccaacttttaagatacattattatttagtaaatatgatttagtttacaagtgactcagggttattctaaaaatcagtttgagaggccaggcacggtggctcacgcctgtaatcctagcactttgggaggctgaggcaggtggatcacttgaggtcaggggtttgagaccagcctggccaacatcgtgcaactttgtctctactaaaaataccaaaattagccgggcgtggtggcgcacgcctgtaatccctgctactctggaagctgaggcaggagaatcgcttgaacccagggtggggtggaggttgcagtgagccaagattgcgccactacaccccagcctgagtgatggagtgaaaaccctgtctcaaaaataaataaaatgaggattgtacagtgaggctaaatgccagatgcctgcaggttccctacccctccctgactgacctcctagtgtcaggattctagataacatcccagtttctcctcttcccatcagctacctctcctctgggctgtcagctcatcttcaatgcttcgttatctggttgaaggcctgaggttgcttttattttcctgtcacatagagtgtagtgcagtggcacacatagtgtgggatttttgtgttgactgtgccatttagaggtccctgtctttgctgaatactggaagtttggcttttggatgttacaatttataatctgctctgttctctctgaagatgagattaacgtgagcatggaatgttctctgagttgcttctccaagcagagagatatgtgtgcagggccacccatgcttaccatttccctactgaggctcttaggatacttttgtaagatattaatagctacttgtggccatgaaacaaactaataactagcttctggcagctttaaatctcactttgacctcagtgtgctctaagcaacgtgggcaggtctagtggtttcgaagcacaaggatttggccaggtgtggtggctcacacctgtaatctccgtgctttgggaggccgaggcaggaggctcacttgagggtcaggagttcgagaccagcctggtcaacatggcaaaaccacatctctacttaaaatacaaaaattagccaggtgtggtggtgggcacctgtaatcccaactactctggaggctgaggcaggagaatcgcttgaacccacgaggcggaggttgcagtgaaccaagactgcaccattgcactccagcctgggtgacaaagtgagactccatctaaaacaaacaaacacacaaaccaacaaaaaaaaacaagtcagctgatttctggctctgcataaggttgatgtagaagtcagaacgccagatgattatataaattactcccatagctaacctacactgcttacacctgcacctcaatacattcagcaggacacagggcttcccccggtatttacaattcagtgacgctgaccccggatatgcctagaagtcacctctgggtcttgtgttgtagttgttagccgaggagaaaaacatctcttccaaatacgcggatgagagggacagagctgaggcagaagccagggagaaggaaaccaaggccctgtccctggctcgggcccttgaagaggccttggaagccaaagaggaactcgagcggaccaacaaaatgctcaaagccgaaatggaagacctggtcagctccaaggatgacgtgggcaagaacgtaagtggctctgggtggtttttctcgtccatgtttcgcctgcccaccctctgtgctattcaccagtccatgcgaggctagctcctggcctttttcatagcgaactatcatcggaaatggaaggaggtttttggactggtgcaggggctgggaggggctgagaatggcagtcgaggatgggtctgagttggggggtccgaggataaggctggggtctgaactctcaggggtcatcttgagtcccggccatgcatcctgtgggaggccaaagccacctccctgatctcctgaggtgccgctcacggtgggtttctcaatcgtcttcatgaagttgagcctcatagaatggggctgcccgctctgccggcaggtccatgagctggagaagtccaagcgggccctggagacccagatggaggagatgaagacgcagctggaagagctggaggacgagctgcaagccacggaggacgccaaactgcggctggaagtcaacatgcaggcgctcaagggccagttcgaaagggatctccaagcccgggacgagcagaatgaggagaagaggaggcaactgcagagacaggtgcgtgctgccggggaggccagcagagggaggtcgggtggcctttttcattcctatcaccactctcatggttggtgtggaaacttcgttttctttatttttttttgaaacagagtctcgctctgtcgcccaggctggagtgcagtggcgtaatctcagctcactgcaacctccacctcctgcctcagcctcccgagtagcttggattacaggcgcatgccaccatacctagctaatttttttttttttttcagtggagacaaggtttcaccatgttggccaggctggtcttgaactcctggcctcaagtgatccattctcctgttggcctcccaaagtgctgggattacagacatgagccacccacgcccggcgtgattccgttttctcatctgcaactggggatgagatgcccacctcacaagggggctgtgctggggaaggggtgcagtgatgtgctgcctaggtgagccaaaggacctcccaggggcaagtggggcagcacacatctctattcctcgcccagcttcacgagtatgagacggaactggaagacgagcgaaagcaacgtgccctggcagctgcagcaaagaagaagctggaaggggacctgaaagacctggagcttcaggccgactctgccatcaaggggagggaggaagccatcaagcagctacgcaaactgcaggtgggtgacactaggagcttggggcatgggtggagggagggcacagttcccctcaggccaccgaagtcagcagagcgggctccaggaagcaagcctgcacctgccattggtgtgggttcagctggggtttttctggaaccattcaggatttggtggctgtctcctgccctgggtagggcagcattattaggtatttggccactgccctcagatcacatcaggggctcagcttctcaggcaggtctgtggagcccacccagaatggtgctcccagcgcaccaccagccacctggaactgagagccatgctcgtgcaatgggaacttctttgtggtcaactgcagaaaatccaaggggtgggtgtgcaaagctgaactgggcagcagaacttgggggagtaaggacatctgagcttgtcctccctgttgactcatgcaggctcagatgaaggactttcaaagagagctggaagatgcccgtgcctccagagatgagatctttgccacagccaaagagaatgagaagaaagccaagagcttggaagcagacctcatgcagctacaagaggtaaagcctcgccttgctaggagagcctcagatgcgggtgtcacggtagcaccccttggcagctccagtctgtgcattcccagatttcatttcgtcctcctctggggtccacctgtctagaaagacacacgcttccctcctctatgtattcacggggcctcccctgagctcagaggaagaacatgtactttcaagggtggctgagttgtcagggtggactcttggtggggcttggcctttccctggcagacaacagccttcctccctcccacctaggacctcgccgccgctgagagggctcgcaaacaagcggacctcgagaaggaggaactggcagaggagctggccagtagcctgtcgggaaggtaggaaactgaatggaggaagagggctctgaagcagaggatggggggacaggcagcatcctcgacccccattttattttttaaattttttcgagacagagtttcattctgtcacccaggctggagggcagtggcacaatcttggctcactgcaacctccacctcccaggttcaagcaattctcctgcctcagccttctgagtagctgagactacaggtgtgtaccaccatgcctggctaatttttatatttttagtagaggtggggtttcaccatgttggccaggctagtcttgaactcctgaccttaggtgatcctcctaccttggcctcccaaagtgctgtgattacaggtgtgagccaccgtgcctggccctggacccccatttcaatgctgctgctgacgaagcgtcctctgagattggggacagacccatggtggttaggttttccgtcagcgctttcatgcctgtttgggggtgtggctgctttcattcattcccaataagtagctgtgtggggagaaggggaggccaggaagagtcagggaggagtgtgctggtccccatcccaatcccagctttgctgacacggacccggcctgagtcccggctgtccacttcctggctgtgtaactacagatgagtcttctaatcttctccaagcctcagtttcacccattagatgatgagggcaatacccctgaggcatgactccaaggagggggcatcttttaaggcgggggagggtagaggcccccaccatggccgcccttcccccaggaacgcactccaggacgagaagcgccgcctggaggcccggatcgcccagctggaggaggagctggaggaggagcagggcaacatggaggccatgagcgaccgggtccgcaaagccacacagcaggtgagggccgcctggacaccacagtcacgctgcctactgtctctcctgcagcaggatcctgcaccagtcaacacacgcgtggcggcttcctgtgtgcaggccctggattgagggacaagagggtggtggggcctgagagtagagatccagggcccttacaccagtgcccaggctgctgtcttcagaatactcctctccacgctgcagtgtctcattttccagccacggcgtggctggctccccgtacctcacggccatccctggagtccgggccttgggatgctctttcattgcgttttcccctagctgaagctctgaccttatccagtgagcccttggtgatgtcactgagcactagttccatggtgggcactagggaccatccagtaacctgcagccccttgtggtgtagggtgaacaggcatcattctccaggcgactccaggacagagaaagcaagggacaagtcactcgctcagcctgggtggcactgacacttgtggaagcacctcttttttttggagacagggtctctctgtggcccaggctggagtgcagtggcgcaatcttggctcactgcaacctctgcctcccaagttcaagggattctcctgcttcaacctcccaagtagctgggactacaggcacgtgccaccactgcccggctaatttttgtatttttaatagagacggggtttcaccatgttggccaggcaggtctcgaactcctgagctcaagtgatttacctgcctctgcttccaaaagtgctgggattacaggcgtgcgccaccacgcccggcctggaagaagctcttgagtggagttttacaggatgaaggagaggacagggtgcccgggatcaagggactcgtgcagaggccaaacaaggcaggaagaggcatggtctcagtgcgctctcttgggcttccctgagtccgcctcatggccttcactctcctccccaggccgagcagctcagcaacgagctggccacagagcgcagcacggcccagaagaatgagagtgcccggcagcagctcgagcggcagaacaaggagctccggagcaagctccacgagatggagggggccgtcaagtccaagttcaagtccaccatcgcggcgctggaggccaagattgcacagctggaggagcaggtcgagcaggaggccaggtatgcgggtgtggagttccgaacccagtttgcaggggggtgatggacagcaggagtcatagtgaagtcagggaacctcttccagcatcagttctggcttgtaagaagcaagctctgtgatgcctacagtgcaggtatgttgtgagaactgaacgtaaacacagcaaagtgccctgctggttcctggcctagggcaagcacctaaagtgtgagctgctcttagcatctccatggtcctcctgacattaacctgccttcccagcagtacatatgacttttcccagcctctgcagggatagcatgctgacagatcaaaaatccaaccaggctggacgtggtggctcacgcctgtaatcccagcaatttgggaggctgaggcaggtggatcacttgaggtcaggagtttgagaccggcctggccaacatggtgaaaccctgtctgtaccaaaaattagccgagtgtggtggcacatgcctattatctcagctactcaggagactgaggcaggagaatcactccaacgtgacacgtggaggttgcagtgagccgagattgtgccactgcactgcagcctgggtgacacagtgggacccttccacacacatacacacacacaaaaaaaaccccaaaaaacaaaagtccaaccggcagcccatttggtacacacactggaagccttcttaattatgggtcgaatgaggcatatgatcacagcacatttcttaccattggattctaaggattctcacccattctcttctagtagctttttcagtaattcgcacgccctgcaatgcacccatttaaagtgtataattcaagggctattcatatattcacaaacatgtaaaaacgatcaccacagtcattttgagaacattttcatcggctcaaacagaaaccccaggccatatgtggtatttcatgcccataatcccggcactttgggaggctgaggtaggtgggagcagcacttgagtccaggagttcgagaccagtctgggcagcatagcaagacttttttatttttatttttttgagacatagtctcactctgtttcccaggctggtgtgcagtggtgcgatctcagctcactgcaacctccgcctcaccctcccaagtagctgggactacaggtgcacaccactgtacccagcttgtaattgtattttttagtagggatggggtttcaccatgttggccaggctggtctcgaactcctgaccacaggtgatctgcccacctcggcctcccagagtactgggattacaggcatgagccaccacgcctggccagagactccgtttctatgaaaaacttttaaaagtctgagcatgctggtgtacgcctgtagtcccagctacttgggaggctgaggtgggaggattgcttgagccaggagttcaaggctgcagtgaactatgaactagggtgaagagcaggcattggagcaccactgcactccaacctgggtcacacagcaagaccttgcctcctccccgcaaaaaaaatagaaaccccatgccctgtaaccactcccttcagtccctggcaaccataatctactttctgtctctatgaatttatctattctggacacttgatatcaacggaatcacacactatgttgtctgctatgtgtcttctttcacttggcaagaattccaggctcatccatgctgtggcatgcattgatactttattccttttcatggctgaatactattccaccatctgactgattcttgagaggagtccagatacggggctcaggaaagcactcaagatgccacctccaggtgacacaccagctacaaggggtgccaccctccgctgaaaccacctgttttccttgctgtttgcagagagaaacaggcggccaccaagtcgctgaagcagaaagacaagaagctgaaggaaatcttgctgcaggtggaggacgagcgcaagatggccgagcagtacaaggagcaggtagcccctgccacccagcctccctcgagcccccagcccccagccggcctcccctaaccacccctccaactctccgcgacaggcagagaaaggcaatgccagggtcaagcagctcaagaggcagctggaggaggcagaggaggagtcccagcgcatcaacgccaaccgcaggaagctgcagcgggagctggatgaggccacggagagcaacgaggccatgggccgcgaggtgaacgcactcaagagcaagctcaggtgaggagcccgtggcccgggaggaccccgtctctcaggccagagaaaagcactgggggctcgggctcctttcggcctgcaaatgccccttgtgcccacagccgccactcccttctgtggtttattcctgcttctccttaatcactaagcttagtgtgggccaggcactgagatcagacccgggccctgccttgcctggtagcagctaaccttctagatcctttaacgatcgaccgtctcccatccggtcctccggctgaggaggaggaagaggctatccccactgtctcctccagcccctccttcattgcatcactgagtcttcacgacatccattgaagctgcaacaccaccccccgccacttcacctccttcctgacatgctctgctcctcctttctccccctcagcactgctgccatctgggctgcattattctcgggtatgggggctgtccgacattccccatcagaaggaaaaagatccctgaaaagtagcaggtgcttacatttctggcctctacccaccggctgcagtagtcccccaccaccctgcaatgtgacaaccaaaaatgtctctagatgttgccagaagtcctctagagatgggagggtacgactgccaccccgctgagaattcctgctgtcactggagtgggggctgttttctctcccatgcctctggtaccttgggggtcccccctgctcccaagggctgcttccaccaccctgtccatccatcccgattggctcccaggaggttttagctccgggcttcctgtctcccacaccactcctcacagttctccatgatttcaacatccaggtgggcgacgcagcctctcggttccttgaccctctgggtgatcctgctgcttctaccgggccaaccagtactcctaggagccctcacaatttgaccctcaggcatcccattgtctgcctggtgccacctttctttggctctgtccccaacggggtcttcactccattaatgccatcagcctctgacccagctccaaaccagctgtctagtaacccccgtcgcgcatcctcaacatccggttccccctcttgcattgctgcaatcatttggtgaaagcacaacccaaatgaaactcaagcttggctgggcacgggactcacacctataatcccagcactttgggaggccaaggcaggtgaatcgctttgagctcaggagttcaagagcagcaagaccccatctctacaacaaacaaacaaaaatcagccaggtgggatggcgcaaacctaaaatcccagctactcaggaggctgaggtgggacgatcagtggagccccagaggtcaaggctgcagtgagccatgatctagccaatgcacttaccctggatggacagagtgagaccctgtctcaaaaaacccaaaacccactctccaccttttcccacagagcaggccttgctcaggggtcctcccacacccctccctcatcttctcactctctgctgcttttcactttttctttgaacttatgatcgctcctccccattctctctcagctggggaccttacttcctacttaactcaaaagcagaaatgatcatgaaacgtgcacaagctcccactgcctcatcatcctacctccgtgcacctctgtacacttctattttttttccatttctatgctgaaccctctggcaccaaccgaggccaacacctccattggacccgaccctcttgttcactcaagcacatagctccaaaaatccttattttgcaaggttttctctttcatttgctccatcagcaaatggaataacctcttagccccatgtctaccttgctacccttactacaaaactggatgtgaatgccgaaaccctgtctctaccaaaaaatataaaaattagccaggtgtggtggtgcatgcctatagttccagctactcaggaggctgaggcacaagaatggcttaaaaccgggagagagaggttgcagtccagcctgggtgacagagtgagactcggtctcaaaaaaaaaaaaactgtatgtgaagagttgctggttcccctcgcccccacccatcactctcccagaagcctcccatgggtgacactaatggccagaggtcccctgacagggcagcagcacgtgacgcagtccatcatgcctctggcctaattcacttgcttccctggacttccccgacaccatccacacctgcttgtcccccgacctgtggggttgtccctcttcctctcctctgctgatccctcacctcgaaacctgcttgccactagaccgccccagggtatcaacttagttctcttttgggcagagtcttgctctgttgcccaggctggagtgcagtagcactatctcagctcactgcaacctctgcctcccagttcaagctatttttggcctatttttatatttttagtagagatggggttgcaccatgttgcccaggctggtcttgaactcctgatcttgtgatccacccgcctcagcctccccacgtgctgggattacaggcatggaccactgcacggccttagttgttttcatctctccccagcgctaggtgagaggtctcaactaatcttggcgctttagaattccatgtatatctaatgactcctcagttcatctctgagaagccctagcttcttcctagaacctcagaccaccctcccgttcccacatggatgtctaataggcagctcacaccaaacatgctgcaccccaagtcctgactgaaactcttcacccccaaactggctcctctctccagctcagcagctaaaatgatgaagttgccaacaattcacatcacaaacctcgtggtccttcttaacgttttggtctcctttataccccacatcccatctatgggagaatctggtcaactttccctaaagaatcctgcccaggctgggtgcagtggctcaccccttaatcccagcactttgggaggccaacgcaggctgatcacctgaggtcaggagttcaaggccagcctgaccaacatggtgaaaccccgtctctactaaaaacacaaaaattagccgggtatggtggggcgtgcctgtaatcccagctactagggaggctgaggcaggagaatcgcttgaacctgggagacacaggttacagtgagctgagatcgcaccactgcacttcagcctgggtgacagaccaaaactcggtctcaaaaaaaaaatctccagtgtctaggacagcaccaggcagagtgaacctttatccctcgggtcctagatattttccccgcttcattctcataccaccacagccatgtgctgagcctcttactacctttaataccaatgacttgatcttttaacagttttaatcatacatgaatataacggcaaataaacatacctcctctatatttttaaaccagcatcacctctatcaactggttacgatgaaagtaatatgataaaaatagtatcaagttcaatatctagctattgtggccacaacttgatcaccaagacctgaagcctacttctccactaaaaagggagtgacaacagccattagcaccaaatagactctctctgacatcataattagacttgtttaaaaagagttggaaaggaaatgactttctcagggcccagttcagttagcggatggcatgcccggaagccatctgaaatcacctctagagtttggggaccactgcgtgagacagggaaaagtccaaacccctctgagaaggggaagagagcagctggcgcagggcaccaagccttcagggaaaagccccactcgctgcatggtgagcgcttgttggtcccccatggataggagagaaaccaggcctaggctcccaaagtacagcaggggcctggaagcatctcccagggttgaggggtcagtggaggagagctgttctcactgtgaagactcctggggcaaagcgcggtggctcacgcctgtaatcccagcactttgggaggctgaggtgggctgatcacctgaggtcaggagttcgagaccagcctggccaacatggtgaaacttcatctctactaaaaacacaaaaatcagctaggcgtggtggcagatgcctgtaatcccagctactcgtgaggctgagacaggacactcctttgcaacccaggaggaggagcctgcagtgagccaagatcaagcctctatactccagccttcagagcaagactctgtctccaaaaaaaaaacaaaaaacaaaaaccctcagatgtgctctgctggcaaccagtccccctgcctctcctgagtggctgggctgagcgatggggatacagccactctgactccctaccccactgctgtctctgcttccctttctcaggcccagtgatttcttttctttttattatttatttttagacggagtctagctctgttgccaggctggagtgcagtggcgcgatctcggctcactgcaacctttgcctcccaggttcaagcgattctcctgcctcagcctcccaagtagctgagattacaggtgcgtgccaccacacctggctaatttttgtatttttagtagtggcaaggtttcaccatactggctgggatggtctcgatctcctgacctcgtgatccacctgcctcggtctcccaaagtgctggggttacaggcgtgagccaccatgcccggccggcccagtgattctttagcacacactggacacctcctgtgggttctgccccagacacttgagccttcttgggcagccaagggcaaagtggaacaaaaagaccatttttgccagttccgacacgaatacacacataatgcaggtggaaggtctgtcctgccttctgcatcttttgggtgcacaaaaacataaaatcaggcactagagccctgagggaggttggtaagcatgcctggctcctcagccaagaaggaactgtagtgcgagtttcaccaagttctatcagccagacgcatctcgacacaagccctctctaaagccagacccacttacctaccactggctacactgccagttacctccggcaagagctgtacaaggcctccacctctcctctcttgctagaggcccgaaagctaatgaagagcaagtaatcataaaccaagggacaggcggctgcaggttccttgcctgggacttcttggcttctgttccaacactgatttctcaaactagcttgctcaaatgcttttacttccctgaaccagtatgcaatcatgggatttataggaggttcttaaaagtagctctaaaggacagacattttcctttccatttaaaaaactgagccgggtgcagtggctcacacctgtaatcccagctctttgggaggccgaggtgggtggatcacttgaggtcaggagttcgagaccagcatggccaacatggtgaaactccgtctctactaaaaatatgaaaattagccagccacggtggtgcatgcctgtaatcccagctactcgggaggctgaggcaggagaatcgcttgaacccgggaggtggaggttgcagtgagcagagatagatcatgccagtgcactccatcctgggtgacagagtatcaaaaaactgcttatcctttcatctaccagcctcaccaaatgctcttggcgtcaggtgattcactgcaacgttgacttaagggtgcttttaatgccaggtgcggtggttcatgcctgtaatcccaaatcccagcaccttgggaggccaaggcaggaagatcattgacatcaggagttggagacaagcctgaccaacatagtgcaaccccatctgtactaaaaatacaaaaattagccaagcacgtggggcctgcctgtaatcccagctactcgggaggctgagacaaggggatcacttgaatccaggacgtagaggttgcagtgagccaagatcgcacccctgcactccagcctgggtgacagagactatctcaaaataaaaaagagtgcctttaattattaaatcgaagcaaatgtctttaacaattaagaatatacttaaccgggctccttcttgtttgctgatggtaacctccggggattctctctctgtttcagagggccccccccacaggaaacttcgcagtgatgcaccaggtatcatgccttcagcttcgcagctgtgtgttgtctcagtatccatttcttttctgcccaatgcgcccctctgcccaccccaatttttaaacccttgcacatttccacgagattcttgcaaaatctggaggcttggatatctttgtgcaaagctttcattgaaaccaagatcaggatgacaaatagacctcatctcttgacccactgtccttcctgcctctgggcagcacatgtgacatgacacccaacagtgtgcgcccttatcactgcatcttgacgagatggcagaggctgtgtgtgtagcttggatttttcttcctttcataccaaaagccactcttacgtggttagggcactcagcagtgctgtcctcccttgtccagtgaagacactgcactgaatgaatatgacagttccactatctgggcacattcctggagaacgtacttggcttctagttggctggtctgggtcacaagtcagagatcacaaagttcacggtaactgcggcgcggcaaccagtcctcccatgattcagctttcacaggcttgtctgcgaaggaaatgagctcactgcgatgtctgacaaatgccgggggctgcacgtggcttgagtgatgtctagctacaaactgcattttcagcacacggggtggaagctgaccaccgcaaagccaagcacagtcctggcagagccttttctggaggcttcacgggcatgtacatgttcagggactggggagtggatacccaagactcaaggatgcacacagggcccttcccaagaaagcatgaagaggtctctgctgctctgggattttgcttttttttttttttttttttgagacggagtctcgctctggagtgcaatggcgcaatcttggctcaccgcaacctttgcctcctgggttcaagcgattctcctacctcagccttctgagtagctgggattacaggctcccgccacctcgcccagctaatttttgtatttttattagagacaggatatcaccatgttggccaggctggtctcaaactcctgacttcaggtgatccgcgcgccttggcctccccaaatgctgggattacaagcatgaccaacttttcacaggtgaagttaggccatgtggatctgacttcacctcatggagaggccaaaccaaccctcatttgtgtccatcttcatttttggagaatctcagctttgctgtcactaccaaaatacttaaagcgcagggtgaggtcttgttaagagccagttttgtgggggagcagatgagtttctaggacacttcaagcagctctcctaccagctgattgggatcataggataagccaaattccagggtgggctgaagtgcagaacccactggtcagtgggaaactgagtccttgcaaactagcaggtgcttacactcaagatgattcccgaggccttggataagctgagtccacgaatagaatccaaatgctaggccaggcacagtgggtcatgcctataatcccagcactttgggaggccgaggcgggcagataacttgaggtcaggaccagcctggccaacatggtaaaaccccgtctctcctaaaaatacaaaaattagccaggagtggtggcatgtctgtagtcccagttacttggaaggctgaggcaggagaatcgcttgaacctgggaggcagaggctgcagtgagccaagatcacgccactgcactccagcctgggcaacacagcgagactctatttcaaaaaaaaattccagattctccaggatcagaccctttaagaaaacctttaggggggtcccttagttcctgtaacaggtatagttggtgtcaaccttggtctaggatttgaaaccagttccaagaaaagcacttcagccaaaacagagtatcttgcaggctgacagccaagcaaggagcttcaacggcccagggcacaatgtatttcttaggtcaagggagcaaatttatccattaagcttttccagttagcaaatagactcttccaagagccaaaaagagagtgcctagagcactgatgtggaggttagggactacttcccagctcatcagatttttttttgtttttttttttggagacagtcttgctgtttcccaggctggagtgcagtggcacaacgttggctcactgcagccttcacctcctgggttcaagcaattctcctgcctcagcctcctgagtgactgggattccaggcgcctgccaccacgcacggctaatttagtatatttagtagagacggggtttcaccatattggccaggatggcctcgaacaactgacctcacgagtgatctgcccacctcggcctccccaagtgctgggattacaggcatgagtcgcagcaactggccaacccatcagggtttgaacctggagttaaaactgtgacgaagagagctgtgtggggagcgtacagggaacagtcaaactgctgctcctctgcgctgaatttgagcatccttctgagtcaagcgcttggaaaacagtgctaaaaaagaaaaagacttaagggtcacatctagagagagaaggatggagagttctctagtagggctgcaagtccagaagcttctctgtgaagctgggctaggagtgtttactttgaagtggctgcagctttaagtatttattcctgatcgctgcactgcgggaagtcccatcctttatagccaggtgggctttcccagccggggtctctcccatcctctgtcaacaaaagggtcatttgcgaattcctcttctcagtgatcatgaatctctgggccttgatttttttttttttttttttttgagacggagtctcaccctgtcgcctaggctggagtgcagtggccacatctcggctcactgcaagctccgcctcctgggttcatgtcattctcctgcctcagcctccctcccgagtagctgggactacaggcacccgccagcacgcccggctaattttttgtatttttagtagagacacggtttcaccatgttagccaggatggtctcgatctcctgacctcatgatccgcccgcctcagcctcccaaagtgctgagattacaggtgtgagccaccatgcccagccgagttgttccttttgactaaagaattggtcactgagttgtgttcatccttatggcttcttatccaacccttgcgtggggagcaaaagtctgctctcttctttgatgtcctaaaataagacctgtcttccgattcaggtcaaacagggccagatggccagagcccaacataattatttgttgcggttgctgaaaagagttaagtgtttcttctgaacggtgaaggctggcagcaggcagatctgatttttccttcttctgcccactctcttcctcctacccaaagtctcccctcacgtgaccagcccttcctgtgaagtcgaggtgataaactcaagagagaaccagcgcagagaggagatggcagcattaaggagagacaggggtgtcctactggctggagctaaaatccacctcagaggccaggtgcactggcacacacctgtaatcccaacactttgagaggctaagacaggtggatcgtttgaggccaggagttcaagaccagcctgggtcacatggcaaaatcccatctctgctaaaaatacaaaaattagccaggcgtggcagtgtgcacgtgcatgtagtcccagctactcaatactgaggctcaaggactgctggaactcaggaggcagaggttgcagtgagccaagatcatgccactgcactccagcctgggtgagagagactcttaaatttcttttttaaatccaccttgaaggccaggtgtggtggcccacgcctgtaatgccagcgctttgggaggccaaggtaggagaactgcttgagctcaggagttccagaccagcctgggcaacaatatcaagacctcatctcaatttaataaaataatccaccttggattaacacgtataatttccttttctaatattcactgggcacctgttttacgccatgtgcggtatgttccacgatcagcaaaacagatgcagcagtccctgcagtggggaaaactcagtccatgaacattcacaccagcagggggtgctgtctcgccttttaaccagggagcccctctgtgtccttctcaaggctgcccttgtccatttcaccttcttccaattcaaatcttgaaaactcacctctaaggcgaatgggggtgaggagatacagaagaaaaacagtatgttctctcttcaactctgccccatgggctatgaataaagtcagaagacaaaatcccctgcttggtttttggcgtttttttcctattctaaatcaaagaccacagcagaccagaatcctgtggcttctcaaatgaccaagcctgacatattgaaaagcagatcgtcttgctttgaaaaaccttctccacccacccccgcaaccaatttcagctgattaaattcaatcactcatgccttaagactggcaatgatttgttgacttcaacttgaatatctgcatcttatttgtgccgtgtgtgttttctgccataaaaaaaatttatattgcaataggactatagctacaagtttaaaatagatttataaaaaatctatcccaaccatgaagatttctttgctaaataatgtgttttcttacaacccacaggcgaggaaacgagacctctttcgttccttctagaaggtctggaggacgtagagttattgaaaatgcagatggttctgaggaggaaacggacactcgagacgcagacttcaatggaaccaaggccagtgaataagcaactttctacagttttgcaccacggcaagaaaaccaaaaaccaaaacaaacaaacaaaaaaaacccaacaacaacccagaacaaagcaaaacccagcagactgtacttagcattgtctaaatccattctcaaattccaaatatcacagacacccctcacacaaggaatataaaaaccaccaccctccagcctgggcaacgtagtaaaacctcatctatacaagaatttaaaaataagctgggcgtggtggtacacacctgtggtcccagctactagggaggctgagccaggaagaacgctccagcccaggacttcgaggctgcaatgagctataattgcatcattgcactccagcctgggcaacagagaccctgtctcaaccaccaccaccaccaccacccctactacccctgtattcaaggtaaaaattgaagtttgtatgatgtaagagatgagaaaaacccaacaggaaacacagacacatcctccagttctatcaatggattgtgcagacactgagtttttagaaaaacatatccacggtaaccggtccctggcaattctgtttacatgaaatggggagaaagtcaccgaaatgggtgccgccggcccccactcccaattcattccctaacctgcaaacctttccaacttctcacgtcaggcctttgagaattctttccccctctcctggtttccacacctcagacacgcacagttcaccaagtgccttctgtagtcacatgaattgaaaaggagacgctgctcccacggaggggagcaggaatgctgcactgtttacaccctgactgtgcttaaaaacactttcactaataaatggttataaatcacaatgtcgttggcttttctgttgagctgttttctatagaggaaaaggagttggggaaggctgggttttgcttcatcgtcccaaagattctctgaagtcagggttaacgtcatgaatgcagaaactgaggcctagagaggtgaaatcaattgcctacaaccccacagccagccagagagcagagcagagatgcaaagtgagactgtctaagggggttactgggccgctcagcagggagggcaggggagagaaataaggtgatgtgtggtctaagggccactgccccctgccctcgaacatgactgggaagaacatcttgactcatcaaaaccagtatcttaagaaaaatacaggatttccttgattttttgagttaaaacacaaggtcttgtccaatgagtcagcaaacactttccacaaaacgtcagatggtggctgggtacagtggctcacacctggaatcccagcactttgggaggctgagatgggaaaatcacttgaggccaggagttggaggccagcctagccgagagagacccccgtctctataaaaaaaaggtgttttttttttgttgttgttagtaagccaggcaggatagtgcacacctgtactcccaacctcttggaaggctaaggcaggaggatcatgtgagccaggagttccaggctgcagtgagctatgatcacgccactgcactgcagcctaggtaacagtaacaccttgtctctcacaccaccaccaccacccacccagccagatagtattttagcctttacaggctacatatggtcttgccgaatattcatcttctttaaaacaacccttaaaaacataataaatcattcttagagtaagggccataaaaacaagctgtaggccctgtccttctttcagcttgagtgttttagacagacatgcctgcaaaggctctgttcaacacaaacgatgccgtataccaccaactccatgggatcagacagatttgggagacaggaaacatggaaacaaaggactccatcttgtgaccagatgctaatatgccttgaatgacgcacaaacacatcccggatacatttctaaaaacctggcttgaatagaaattttcaaaaagattttttcatattttttaacttggttaaaaaaagtttttcaccactctgtgggaaaacattaaagtataaacatacaaagcctctttgaccagaagcccaacaagttcaacattcgtttctcttgattttattgatcttttaaaaaaataaaaggacatcttctgtggatacaggttaggatgtttctagggtaagaaacccaccatcgcagcgtaattctctgcggaatttcagtagcacttggaaagttctgttttcaacctgaaatttttgctgttcttccagaaaataacttagtaacaaaatgaaggccgtgaagctgcaggcacactccagaaattagtgtgttcttttaactcgtgtcccaaagagacagcagttcctaacatgcagtgatgagtggacacaccatggtgcgttggaaatcccacgttcacgtctttgacaaggaagcctcctacaatgatcttgtgctttaattttacttgatggtcaccctggttacttcattatgcctttgaatgaagtcctgttcttagtggctgcattaccaaggccatcttgccccaaagacccctcagggtcctgaggcagaattccccccaccccaccaggggactcaggaaaatgaatgatcgcagtttgccaaaagaggtcagatttcccactgacgctggttggtctggaaaattactctgaaaactcgaacgcacctctaggaatctcaatgagaagctaagaagcaggctacagtctcagaggtttatgacacctttttttttttttttggagacggagtctcactctgttgcccaggctggagtacagtagcgcgatcttggctcactgcaccctccacctcccgggtccaagcaactctcctgcctcaacatctggagtagctggaattataggcacgcaccactgcacccagctaattttttgtatttttagtagagatggggtttcaccatgttggccaggctggtcttgaactcctgacctcaggtaatccacccgcctcggccttccaaagtcttaggattaccggcctgagccaccgcgcccagcctattccagtttttaaaaaggcatgtgactgttaagttctctgttcttagacatgatttcagtacaccacaaagcactgggagattttgttctggaagacgattccacctggttgggagttggggggaagagcctctgagagaagctccatcccacatttacggagacttgggacattaaaaacacctgtcaagaccaatcaggggccaggcacggtggctcaggcctgtaattccagcactctgggaggctgaggcgggaggatcacttgaggccgggagttcaagaccagcatggccaacatggtgaaaccccgtttctcactaaaaatacaaaattagtgggtgtagtggcacactcctgtagtcccagctacttgggaagctgagataagagaatcgcttgaacctaggaggcggaggctgcggtgagccgaaattgcaccactacactccagcctggacaagacagggcaagagcatgactctgtctcaaaaaagaaaaaaaaaaaaaagaccaatcaggacctccgcttgggttagtgcaacacaatggggcatgggaacgatggctcatgcttgaaatcccagcattctgggaggccgagatgggaggatcacttgaggccaggagttcaagaccacactgggcaacatggcaaaaccccgtctctattaaaaatacaaaaaattcagccaggtgtggtggtgggtgcctgtaatcccagctacctggaagactcaggaacaagaaccgtttgaacccaggaggcggaggttgcagtgagctgagatcacgccaccacactccagcctgggtgacagagcaagactctatctcaaaaacaacacggtagcctcatcaccgacaacttagagcccttcccagagagccccttttgtccctctttgcaatgcacacggtggcaggtaaggatgaaaagacatttcccagggacaaaccccagagcacaggtgatggcctcggtcattggcttgggccgcaaagctaactaactatggtgactgctcttatttctcaaactaacttaaaacaaaaacctagtgtaaaaagacgacaaaaggtaacgacttccgcaccaacaccaagaccttcagcttccgtggttttcctaaagcaacatcttgactaccccctgggctgacggcagcggcgatgaagacatgtgtgaaggcggcttcccaaattccaggcgcttccccaaccttcagacagagcaaaccaaattaagctgacataacagctgtgacaaactggctagcaccggggcccagagagttataagggtgaacatcaagagtcaggagcagggtctcacagggtctcaattttctctcctgtgaaatgaagaagaggacactggctacctggctctcagattccaaggtcacacaaaacgcccagtctcagacccactagaaaaatccatctcttacctattgtttgtttgttttacagcctacgcaacatagtgagaccctgtctctatgaaaaatgcaaacaaaaattagctgggtgtggtggcctgcatgtgtagtcccagctacttggtaggctgaggtggaaggatcgctggagcccaggaggcggaggttgcagtgagccgagatcacaccaccgcagtctagcctgggtgacagagtgagaccctgtctccaaaaaaaaaaaaaggccaggcatgattgctaacgcttgtaacccccagcacttgggaggtcaaggtgggaagatcgcctggaaaattaatctgaaaactcacctctagaaatctcaatgagaagcagactacagtctcagaggtgtattctcaaactcaaagccaggaggtttgagaccagtctgggcaacatagcaagactgtttctataaaatataaaaaaaattagccaggggtggtggtgtgcacctgtagccccagctacttgggaggctgaggcaggaagatggcttgagcccaggaggacgaggctgcagtgagctatggtcgcaccactgcactccagcctgggtgacacagcaaaaccctgtctcgtagaaagaaaacaaacaaaaattaatttttttttttttcttgagaaagagtctcactctgttgcccagagtggagttcagtggtgcaatcttggctcactgcaacctccacttcctgggttcaagtgattcttgtgcctcagccacccaagcagctgggactacaggcatccgcgaccatgcccggctaattttcgtatttttagtatagatagggtttcaccatgttgcccagtttggtcttgtgaactcctggcctcaagtgatccacccacttctgcctcccaaagtgctgggattacaggtgtgagccacttcactgcacctggcctaaaaatccacgtgtaaaggtctcaaagttatgtgcatgccatggaaaatattcttaatttcctgtcacgtgtctgctacaaacccatcaaattcctacggcttggggcccagagagatggtagtcacacaccttgcagaattcctgaatctgaaagctgccccttttttttctgagacaaggtctcgcttcatcacccaggctggagtgcagtggctgggaacacggctcactgcggcctcaacctccagagctcaattgatccgctgccctcagcctcccaaagtgctgggattacaagtgtgagccactgagcctggccctgattttctttaggcaagaaaattaatgacactgttagagatcagatctgcactgtcccatcgggtggctggtttcaggaacatagtctgggctagaagttagtgccagtttctcaaaggttctacagatttaaaaagaaaaaaaagggctggttgcagtggctcacgcctgtaatcccagcactttgagagcccgaggtgggtggatcacaatgtcacgagatcaagaccatcctaacacagtgaaaccccgtctcgactaaaaatacaaaaaattagctgggcatggtggcacacgcctgtaatcccagctactcaggaggctgaggcaggagaattgcttggacttgggaggcagaggttgcagtgagctgagatcatgccactacactccagcctaggcgacagagcaagacgtctcaaaaaaaaaacaaaacaaaacaaaaaaaaaaacttcaggggaagcagagccatgactgatgctcaattccccaaataagggctttatttttatttaactaattaattaactttttgatatggagtcttgctctgtcacccaggctgctgtgcagaggcacaattttggctcactgcaatctctgcctccagggttcaagtgattctccttcctcagcctcctgagtagctgggactataggcacatgctaccatgcctggctcatttttctattttttttggtggagatggggttttaccaatgttgcccagactggttttgaactcctgacctcaagtgatccacctgccttggcctcccagactgctgggattacaggcgagcgtcaccacacctggcccaaataagggcttttatacaggacattctcacagtgtaaccgtgagtagcagctgtagaatcaaatgataaaaatgaccttcttggccaggcatggtagcccacacctgtcgtcgcagcactttgggaggatgaagggtgaggatcacttgaagctcagagtttgagaccaaactcggcaacatggcaaaacctgtctctagaaaaaatacaaaaaattagccgagcacggtgacacgcacctgtactcccagctactcgggggactgaggtgggaggatcgtttgagctgggaggcagagggtgagccatgatcctgccatcgtattctagcctaggtgacagagtgagaccctgtctcacaaaacaagaccctctctctagccctttgttcaagccacaagacaccacctaatgctgcctgcagggagcagaggagaggataaggtttgctgaaataatcctataatttaaaaagacacatggctgtgggctgggggtgagtgtctcttgcctggggcaggcgggttctccccgccagcgagaggtttattagaaggtactgaccccttatcacccaaaggcacgctggtgctgcttggccgtctctccccgccatctctgttcttgctgctccgcccagaggctgggccacctgttcggtttggggactgatcgtacacgaggttccggcaggaagcgagtttggactccagtgcctggacagaaatacacttttatctctcaagttataggcaaggactattctgtcttaccagagcctgtacagaagaacgaaccccagacagtggttctcaaactgttgtgcactggaattccaaggtgggaccccaagaggaatccaacgtatatgccagtctcagaaccaagcaccttaagtatttgggagctggctgggcacaatggctcacacctataatcccagcactctgggaggccaaggcaggaggatggcttgacatcaggagtttgagaccagcctgggccacaaagtaagatcccatctcagtttttttttttgttttgttttttacttttttagacgctgtgtcacccaggctggagtgcactggtgagatcacagctcactgcagcctcaacctcccaggctcaaccaatccctcccacctcagcctcctgagcagctggaattataggcatccgcaatcatgcccagttaataaaaaaaatttttaatgcaaaaaattttttttaattacgaaaaattttttaaaatgtttgggagctgcctggaaaaagatcacggctcactgcagcctcaaccaatccttccacctcagcctcctgaatagctaggactatgcacaatcatgcttggcttaaaaaaaaaaaaaaaattcttttttaattacaaaaaattttttaaaatgggagctttctggaaaaatcactaacctaccaattatccaactccgcttgtaggaagtaggaaatccacttctggaatccttcaccctttggtttaccttgttaaacctctgcagaatggcaagaagtttggtaaggacttggtctggctacaacagaccctgaggaaaccaaaaggacactgacagcaccccaggcttctctatactccaactaggctaaatactgaaatgcagacctgcttctagaatagcaaaccagacagccaaaaaccagaagtaaaaacaaaagaaatgagttgcaagcttctattaagttgtagctacaaatacactgtgtacagtgacaacttggtaggagttaaattatgtggccttctaggcatcatttttaaaaataaactacaaagaatacctatgtttttacttaagcacaaaaggatccctccctgtaattaacataaaagctgaaaggccaaattctttgccctaggctttcaagattttttttttttttttttttgagaccaagtctcactttgtcacccagcggtgcgatctcagctcactgcaacctccgcctcccggattcaaacaattttcctgcataagcctctcaagtagctgggatcgcaggtgcccaccaccattcctggctaatttttgtatttttagtagagatggggtttcaccatgttggccaggctggtcttgaattcctgacttcaggtgatccacccatctcggtctcccaaagtgtcaaaattcacttaaaccccaagaaacaaaccaaaaaaaaaaaaaaaaaaaaaaaaggtggcagtttttttctcttctgagacaacgtcgtgctgtcacccaggatggagtgcagtgttggaatctcagctcactcagcctcaacctcccaggctgaagcaatcctcccacctctcagcctcctgagtagctgggaccaccagtgtacaccatcaggcctggctaatttttgcattcttgtagaggccaagtcggggcagggggtttcaccatgttgcccgggctggtgtcagactcctgagctcaagtaatctcccaccttggcctcccaaagcactgggattacaggtatgagcacccggccaaaagagaaggcagtttccaagtgctccttaatttttcgagttaaggaaaaaacacacatatcaccctaatttcccaaatttcctagaggaaaaacggtaaaaggaaagagacatacatagggttcagagcagggcttcgagtcagagctctgagtgtctggcagtaactcccacaggaagctctaatgattcccagggatgctaaaggagcagccacacctaaaactcaccacactgctatgaaaggggctggacgcattggctcatgcctgtaatcccagaactttgggaggccaacctgggaggatcacttgaggccaggagtttaagaccagcctgggcaacacagcgatacccacattactacaaaaaaatgaaagtatcagccaggcatagtggcgcacacctgtggtccaagctcctcgggaagctaaggtgagaggatcgcttgaacccaggattttgaggctgcagtgagttgtgatcataccactacactccagcctgagcaacagagcaagaccctgtctctaaaaaaaaagaaaaaaagaagagagggaaggaactagatcaacccccttcacacatcctgaaagacaggcaggaaggcaccaaacgccaggaaagtgtggtcttaccccgactttccgcagtaggtctcccacaatgttgagggctgatatccgggccgcaggtgtgaggggggtccccccggtggagtcgtccaggcctgggtgtgcaaagggaagagcatgtaactcaccaacctatagtcatgtctgtgcgttaacatcgctagatccaaaaccacgggacaggagggacactgacgcctttcctcggatcccaaaagctaccctatttctttccgtagttaaccgcatcacacacccaaggcccgtatgacaaccaatttttcaagtccttgtgatgactgcaacaaatacttatttttacatgttagtcttgctctgtcacccggactggagtgcggtgatgtgatctcagctcactgcaacctccgcctcccaggttcaagcgattctcctgccttggcctcttgagtagctgggattatagccatgtgccaccacacccggctaatttttgtatttttagtagagacagagttccatcacgttgtccaggctggtctcgaactcttgacctcaaatgatctgcccgccttggcctccaaaagtgctgggattacgggcgtgagccaccatgcctggcctttaacaaattttttttttaatagagacagggtctcactatgttgcccaggctgatcatgaactcctagtttcaagcgatcctcccaccttggccgcccaaagggctggtatttacaggcatgagccaccgtgcccagccacattagtctttttaaacaaacccaaaacaaatccttttgaaattgtagaaaatccatatagttaattaacataatggcatctgtgatagatacaagaactatagacaggatgatccagctttacaagggtcccgctctgcagagcctctcttctccaagtggggtccatgcaccagcagcacatgagaactgttagaaatgcagaatctctcggccaggcacagtagctcacacctgtaatcccagtgctttcagaggccgaggcagttcgatcagttgaggtcaggagttcaagaccagcctggccaacatggcaaaatcttgtttctactaaaaatacaaaattagctgggcatggtaacaggtgcctgcctgtaatcccagctactcgggaggctgaggcatgagaatcgcttgaatccaggaggcagaggctgcagtgagccaagatcaatgccgctgcactccagcctggccgacagagcaagactttgtctcaaaaaaaaaaaaaaagagagaaagaaatttcaggccccacccaagacccacttgatctgaggtacattctaccaagatccccaggtaagctacatgcatattgaagtgtggaaacatagccaggcatggagttgcatgcctctagtcccagctactcaggaggctgaggcaggaggatcactggagcccaggagttggaggctgcagtgagctatgattgcaccactgcactccagcctgggccacagaccaagactgtgtctctaaaaacaacaatgaaataaagtatgcaaaatggctctagactggggctaggcacagtgactcatacatgtaataccaccactttcaggggctgaggcaggcagatcacctgaggtcagtagtttgagaccagcccggccaacatggtgaaaccccatctctactaaaaatacaagattagccaggcatggtggtgggcacctgtaattcaagcttactcaggaggctgaggcaggagaatcacttgaacctgggaggagggggttacagcgagccaatatcgcaccattgcactccagcctgggcaacagagcaaaactccatctcaacaaaactaaacagaagggctctgcaccggaattctagaagtctcactggtctcttcatgcccaggggacaagctaagggataaggtagtagatggtagggtaagccctggagcctgcctgcctgggtctgaatcccaaaccatctgccattcaattgcttcatgactctgcttaactcagagcctcactttcatcaaacggggacagcacctgcatcctgggcctgcggcgaaggctgcaggctggccagcacacactgagcactccttaactgtctgttattaatatctgctgtaaaaggcctgatcggaagctgtcagcagaggggctggggtgagaactgagattctttttttctgcccatgcagcacacgttacgctgagtctagctctcggtggatgtattactaaacccacagaacgctttttacttttttgtatttggtcagtgacatttcaaatttgggaggttttatattcaacaagaggatttttgaccaggcgcggtggctcacacctgtaatcccagcactttgggatcagccgaggtgggcggatcacttgagtccaggaatttgataccagcctgggcgacatggcaagactgtgtctccacctaaaatacaaaagttagccaggtgcctttagtcccagctactccggaggatgaggtgggagaatcacttgagcccacgatgaagaggttgcagtgagccaagatcacgtcactacactccagcctgggcaacagagtgagatcctgtctcaaaaaaaaaaacccaacaaaaaaaaagaggatttctggctttgaagaatggaaaaagctgcagatgaagggccaatcctcgtagctgcagagtggcagccacccgctctgggtggggtttccatttcatcagactccactactgcctcttacccagtcctcactgatctcaatgcccatccccaagaacatcccagtctactctctgctcaaagcctgagagcaaatcaggctctgagcctgatgcaaatcatcacacccccaggacccaccccagattcttacccagaaacactttgtgaaccgagaaaatcctgcaattcccactccccttaccacgtctgaagctcccaggtgtgtttaaacttgagctgggtcctcggtgagcaatgggcgtggacggcacggagcccgtggcctgcacagctgtgtctgtcctctcagcttccactgagctgggcatgggggtcctgggtttctcctgcttctgctgcacggccagttcctgccgcaaatctgtgccagaaaaaggattcaggaattcaagtcctcagccaggcgcagtggctcatgtttataatgccagcactttgggaggccaaggcaggtggatcgcctgaggtcaggagttcgagaccagcctgaccaacatggtgaaacctcatctctattgaaaatacaaaaattagcccagcatggtagtaggcacctgtaatctcagctactcaggaggatgaggcatgagaatcatttgaacctgggaggccagggtggcagtgagctgagattgctccagcgcactccagtctgggtgacaagagcaagactacgtctcaaaaaacaaaaagggaatttaagtccttgcttagggttggtggggtgcagggagagaggttcaacagtagataccagtcagaaaaaagacctactggggtgaaacactccaggtagaaaccccaaataaagggaaacccacaggaccttgcctagcagacttggaactctacaggatgtttctcttgactaacaaaatggtttcagatttttaaaaagctatgacagtgacacactaatgcttttattattgaaaaaacaattccaacatagcagtgtatttagaacactaaatgaaaatatgcccgggagcagtgactcatgcctgtaatcccagcactttgggaggctgaggtgtaagaatcacattaatccagtaagtcgaggctgcagtaagccatgatcataccacttcagcctgggcgagagtgagacctctggctcaaaaaaaaaaaaaaaaaaaaaaaaaaaagaaaaaaaaaaaaaaaggccagttgcactggctcaagcctataatcccagcactctgagaggtcgagatgggaggattgcttgaggtcaggaattttcaggccaacatggcaaaaccccgtctctattaaaaatacaaaaaattagccatgcgtggtggtgagcgcctgtagtcccagctgcttgggaggctgaggcaagacaatcgcttgagcctgggggacaagcagtgagtgcagtgagctgagatcacgccactgcactccagcctgtgtgacagagcaagactgtctcaaaaataaataaagtatgctttccagactatccccaaatgctcctcctcactcatcatcaccataacatgtgggagagcttttcaaccattgttctctgaatttttttttttttttttttttgagatggagtttcactctcttgcccgggcttaagtgcagtggcacagtctcggctcactgtaaatctgcctcccgggttcaagtgattctcctgcctcagcctcccaagtagctgggattacaggcacgcaccaccacacctggctaatttttgtatttttagtagacacagggtttcaccatgttgtccaggctggactctaactcctgacctcaggtgatccacccaccttggcctcccaaagtgctgggaatacaggcgtgagccactgcgcccagctgttctctccattttcaaacataaactttatacatatgtatgtatctactgagcataaaacaagaaaattttttattaagcattactggaaacatacaatatgttgtcctgtgtatgacttactctccccacttcagtggtatgtcttggcaatgatttttgttttagagacagggtctgactcagtcacccaggctggggtgcggtggcacaatcatagctcaatgtaaccttgaactcctgggctcaagtcatcctcccacttcagcctcctaagtagctggaactacagacatatgccaccaggcctaatttttacaattttcatttttgtagagatggggtatcactatgttgtccaggctcatcttgaactcctaggctcaagcaatcctcttgcgtccgtctctcaaagcactgagattacaggcatcagccactgtgcctagccttggcaatctttctaccacaacatttctatctactgttcattttaaccattaacatttcacaaaatacatctatgtacttcatttaaccacttcattactgatggacatctaggaacaactactttattaaacttaagaatttttactttttatcccccacctactggttacacattagaaagcaaatcgacgttataaataattaattgggccagcaacagtgacccacccctataatcccagcactttgggaggccgaggcaggcagatcgcctggggtcaggagttcaagaccagcctggccaacatggtgaaaccccatctctattaaaaatataaaaattagccaggcatggtggtgcacacctgcagtcccagctactcaggaggctgaagcaggggaatcgctgaacctgggaggcagaggttgcagtgagcagagatagcaccactgcactccagcctggacaacagagcaagacgccatctcaaaaaaaaaaaaaaaaaaaaaaaaaaaggtaaaaacaacttggacaatccactaatgaatgtcttttttttttttttttttttgagacaagagtctcactctgtcacccaggctggagtgcaatggtgtaattttggctcactacaacctccacctcccaggttcaagcaattctcgtgcctcagcctcctgagcagctgggattgcaggcacccaccaccataccctcatgttttctatttttagtagagatggggtttctctatgttgtccaggctggtctcaaactcctgagctcaggtgatccacctgcctcagcctcccaaagtgctgggattacaggtgtgaaccactgtgcctggccaaatgcctcattacagtttcaacattctacctctggaagtgccaactgaaaaagagcaaatgctgatgaggtttcaaagttttagccaaatatattggttgccatcaagtcacaaaaataataggctagctggcaattccaccagaaatttctccccacaacatctttgcttcttaagagacagggtctcactctgtcacccaggctggagtgcactggtgccatcatagctcactgcatactccacctcctgggctgaagcaatcatcccaccttggcttcctgagtagctgggactacaggcacatgccatcacacccagctaatctttaaatgtttttgtaaagatggagtcccactatgctgcccaggctggtctcaaactcctgggctcaagagatcctcggcctcccaaagtgctgggattacaggtgtgagccactgtgccagatctccccacaaaactctctgttcctactgagcatcagggtagtttgctgtgtttgtgaattacagaccaggaagcatctttctggaaataaattctgctgcccagaggcagaatcccaatacaaggacttcatctgtgaaccccaaagctatttctctaaatacccataaggggcccttacagggctggatgtctgactgttctcagctccagccagggcccaaggcaagagtctgcccagtgcagtccgacaccctctgattagacaacctgggtgcagagcagggtgtggggtccctgtaaagataatgctgggagagcttgtgggacaagatgttgctcaggtagggagaggggaccatgctggtgaagacaccaaggcctcctgacctctggcttcatccttcagtctctgaacagattccaggagattctctttttcatcaagttcactttccaggaaggcatttctttcgatggcctgattcaagcgctgctcaaagtcttcgagagacatgatcgtggcgctggcgaagagaaaagcagagttatccaagaggacaaaccgcagcatccctccagcaccgcggatccaggaggtgcgaagggtcagacacacctgggcacaagtcccagccccaaacttcctagatgccacagagtgggccaagtcccttaaccttctggggcatgggctctttacctgcagaatgggactcatcatagctcatggggtgcacgaggctgtcatgaggattaaataagatgctgcccacacagcactcagcaataagccaaagccctatcaggactgcatgtggcatttggtggtttgagaagaccactatgctccatcttctcttgcaagctcacaatgccaaccagcattaaaaataacctaatatgactgggcaaggtggctcatgcctgtaatcccagccctttgggaggccgaggcaggtggaagacctgagatcaggagttcaagaccagcctggcaagctt

SEQ ID NO: 284 - DNA, 6227 bp, Homo sapiens
  Genbank Accession No. AF001691
cgcgccgccgctcgctcacctgcgctcccgcccgcccctcggtgcgcgcccggcccgccagccgccgccgcccgcaccccgagcgccaccatgaactcgctcttcaggaagagaaacaaaggcaaatacagccccactgtgcagacccggagcatctctaacaaggagctctcggagctgatcgagcagctgcagaagaatgccgaccaggtggagaagaacatcgtggacacagaggccaagatgcagagtgacctggctcggctgcaggagggtcggcagcctgagcaccgggacgtgaccctgcagaaggtgttggactctgagaagctgctctatgtgctagaggcggatgcggccattgccaagcacatgaagcacccacagggggacatgatcgccgaggatatccgccagctgaaggagcgtgtgaccaacctgcgcgggaaacacaagcagatctacaggctggcggtgaaggaagtggatccacaggtcaactgggcggcactggtggaggagaagctggacaagctgaacaaccagagctttgggactgacctgccgctggtggaccaccaagtggaggagcataacatcttccacaatgaggtcaaggccatcgggccccacctggccaaggacggggacaaggagcagaacagcgaactccgggccaagtaccagaaactgctggcagcatcacaggcccggcagcagcacctgagttcgctgcaggactacatgcagcgctgcaccaatgagctgtactggctggaccagcaggccaagggccgcatgcagtacgactggagtgaccgcaacctcgactaccccagccgccggcgccagtatgagaatttcatcaaccggaacctggaggccaaagaggagagaatcaacaaactgcacagcgagggcgaccagctgctggcggccgagcaccccgggaggaactccattgaggcgcacatggaggctgtgcacgcagactggaaggagtacctgaacctgctcatctgcgaggagagccacctcaagtacatggaggactaccaccagtttcacgaagacgtgaaggacgctcaggagctgctgcgcaaggtggactcggacctgaaccagaagtatggccctgacttcaaggaccggtaccagattgagctgctgctgcgggagctggatgaccaggagaaggtgctggacaagtatgaggacgtggtgcaggggctgcagaagcgaggccagcaggtggtgcccctcaagtaccgccgggagactccgctcaagcccatccccgtggaggcactctgtgactttgagggggagcagggcctgatctcgcggggctacagctacaccctgcagaagaacaacggggagagctgggagctcatggacagcgctgggaacaagctgattgctccggccgtctgttttgtgatcccccccacagaccctgaggccctggctctggctgacagcctgggcagccagtaccggagcgtgcggcagaaggcagctgggagcaaacgcacgctgcagcagcggtatgaggtgctgaagaccgagaatcccggagatgcctctgacctacaggggcggcagctgctggctggcttggacaaggtggccagcgacctggaccggcaggagaaggccatcacagggatcctgcggccaccactggagcaaggccgggctgtgcaggacagtgccgagcgggccaaggacctcaagaacatcaccaacgagctactgcggattgaacctgagaagacgcggagcacggctgagggcgaagccttcatccaggccctcccaggcagtggcaccacacccctgctgaggacccaggtggaggacaccaaccggaaatacgagcacctcctgcagctgctggacttggcccaggagaaggttgatgtggccaaccgcctggagaagagcctgcagcagagctgggagttgctggccacacacgagaaccatctgaatcaggatgacacagtgcctgagagcagccgtgtcctggacagcaaggggcaggagctggcggccatggcctgtgagttacaggcccagaagtccctcctgggtgaggtggagcagaacttgcaggcggccaagcagtgctcgagcacactggccagccgcttccaggagcactgcccggacctggagcgccaggaggccgaggtgcacaagctgggccagcgtttcaacaacctgcgccagcaggtggaacgcagggcgcagagcctacagagcgccaaggcagcctacgagcacttccaccgcggccatgaccacgtgctgcagttcctagtcagcatccccagttacgagccccaggagacagacagcctcagccagatggagaccaagctgaagaaccagaagaacctgctagatgagatagcaagtagggagcaggaagtacagaagatctgtgccaattcccagcagtaccagcaagctgtaaaggactatgagttagaagcagaaaaactaaggtctcttctcgacttggagaatggaaggagcagccacgtgagcaagagagccaggctccaatctcctgccaccaaagtgaaggaagaggaagcagcacttgccgccaagttcactgaagtttatgccatcaacagacagaggctgcagaatctggagtttgctctgaatctcctcagacagcagccggaagtagaagtgacccatgagaccctgcaaaggaataggccggactctggagtggaggaggcgtggaagatcaggaaggaactggatgaggagactgagcggaggcggcagctggagaacgaggtcaagagcacccaggaagaaatctggaccttgaggaatcaggggcctcaggaatcggtggtgaggaaggaggtgctcaagaaggtgccggatcccgtgctggaggagagcttccagcagctgcagcggacgctggcagaggagcagcacaagaaccagctgctgcaggaggagctggaggcactgcagctgcagctgcgtgccctggagcaggagaccagagacggggggcaggagtacgtgttcaaggaggtcctgcgcatcgagcctgacagggcccaggcggatgaggtcttgcagctgcgggaggagctggaggcactgaggcggcagaagggcgcccgggaggcagaggtgctcctcctgcagcagcgtgtggccgccctggctgaagagaagagccgggcgcaggagaaggtcacagagaaagaggtggtgaaactgcagaatgacccccagctggaggcagagtaccagcagctgcaggaggaccaccagcgccaggaccagctcagggagaagcaggaggaggagctgagcttcctccaggacaagctcaagaggctagagaaggagcgggccatggccgagggcaagatcaccgtcaaggaggtgctcaaggtggagaaggacgcggccaccgagagggaggtcagcgatctcacccgccaatatgaggacgaggctgccaaggctcgcgctagccagagggagaagacggagctgctccgaaagatatgggccttggaggaggagaacgccaaagtggtggtgcaggagaaggtgcgggagatcgtgcggccagaccccaaggcggaaagtgaagtggcgaacctccgcctggagcttgtggagcaggagcgaaagtaccggggtgccgaggagcagctccggagctaccagagtgagctggaggccctcaggaggcgaggcccccaggtggaagtcaaagaggtgactaaggaagtcattaagtacaagactgaccctgagatggagaaggagcttcagcggctcagggaggagatcgtggacaagaccagactgatcgaaaggtgtgatttagagatctaccagctgaaaaaggaaatccaggccctgaaagacaccaaaccccaggtccagaccaaagaggtggtccaggagatcctccaattccaagaagaccctcaaaccaaggaggaggtggcgtctctgagggcaaagctctcagaggagcagaagaaacaagtggatctggagagggaaagagcttcccaggaagagcagatcgcccggaaagaggaggagctctcgcgggtgaaggaaagggtggtgcagcaggaggtggtcaggtatgaggaggagccaggcctccgggccgaggcgagtgcctttgccgagagcatcgatgtggagctgcggcagattgacaagctgcgggcagagctgcggcggctgcagcgccggcgcaccgagcttgagcggcagctggaggagctagagcgcgagcggcaggcccgcagggaggccgagcgcgaggtacagcggttgcagcagcggctggcagcgctggagcaggaagaagctgaggcccgtgagaaggtaacccatacgcagaaggtggtgctgcagcaggacccgcagcaggcgcgagagcatgccctgctccgactccagctggaagaagagcagcaccggcggcagctcctggagggggagctcgagaccctccggaggaaactggctgcactggagaaggcggaggtcaaggagaaggtggtgctctccgagagtgtccaggtggagaagggcgacaccgagcaagagatccagaggctcaagagcagcctggaggaggagagccgcagcaagcgcgagctggacgtcgaggtgagccggctggaagccaggctttcggagctggaattccataactccaagtcatccaaggaactagactttctgagggaagagaaccacaaattacagctggagaggcaaaacctgcagctggagacccgaaggctccaatcggaaatcaacatggcagcgacggaaacacgagacctgcggaacatgaccgtggcggactctgggaccaaccatgactccagactgtggtccctggagagggaactggatgacctcaagaggctctccaaggacaaagacctcgagatcgacgagctgcagaagcgcctgggctccgtggccgtcaagcgggagcagcgggagaaccacctgcggcgctccatcgtagtcatccaccttgacacaggccgcgagctgtccccggaggaagcccaccgtgccgggctcattgactggaacatgttcgtgaaactcagaagccaggagtgcgactgggaggagatctcagtgaagggtcccaatggggagtcctcagtgatacacgacaggaagtctggcaagaagttctccatcgaagaggccctgcagagtggcaggctgacccctgctcagtatgaccgctatgtcaacaaggatatgtccatccaggagctggcggtcttggtatctgggcagaagtaggcacagctcttgcaactcttcgtaacggcagacgctggccctctcctacgacgcagtgacctccttggtgtcgtcctctccctagccctggtgcaggccaagcattttatacataccctcgctgccaggctgctcagagtcccgcccacatatgagacaggcactggctgaagacaggcaactctcgtcccaaccatcattcaccctgagtgacgtacttcatcctccaatgactggacaactgcgatgccttttcctcccttttcctgtacactcccagcaacaaactcctcatgataactgcacacaatctgaaaaccactgaaggacaagccaaccacagcagccaagcccactccttgcagcatgggtactggtggcacaccagacagtgacactgccccacaaaggcctgggcccgtgggggctgctgcctggcatgacatctctccagatttctggcttaaaacaactttccatccgagaagcctcctcagtagttactctgctcatgagacagatctgggctccaagccaggaaaggtgaacagaaaccacaagtgtccagccctcggtgctggagtggacgttaattgtcagccaccagactgtcccggcacctacagagaatgtttcacagttctggcatttaaatcctttgatagtggattgtgctgctgttagccttagtttcagtgctttacaagtctcgcttattatctcattggtatttaggtatacaaaacagttgattattcaccacgccaatatctgggtctctgtatctcatgtagaacataagaaaatgggaactaatagggaactttatttatagcatgaaaataaacctggtggctggagtctga

SEQ ID NO: 285 - DNA, 1347 bp, Homo sapiens
  Genbank Accession No. AF002282
gccctgcgcggggacactcagagcccggtggggggaggaaggcggcatgccccagacggtgatcctcccgggccctgcggcctggggcttcaggctctcagggggcatagacttcaaccagcctttggtcatcaccaggattacaccaggaagcaaggcggcaggtgccaacctgtgtcctggagatgtcatcctggctattgacggctttgggacagagtccatgactcatgctgatgcgcaggacaggattaaagcagcagctcaccagctgtgtctcaaaattgacaggggagaaactcacttatggtctccacaagtatctgaagatgggaaagcccatcctttcaaaatcaacttagaatcagaaccacaggaattcaaacccattggtaccgcgcacaacagaagggcccagccttttgttgcagctgcaaacattgatgacaaaagacaggtagtgagcgcttcctataactcgccaattgggctctattcaactagcaatatacaagatgcgcttcacggacagctgcggggtctcattcctagctcacctcaaaacgagcccacagcctcggtgccccccgagtcggacgtgtaccggatgctccacgacaatcggaatgagcccacacagcctcgccagtcgggctccttcagagtgctccagggaatggtggacgatggctctgatgaccgtccggctggaacgcggagtgtgagagctccggtgacgaaagtccatggcggttcaggcggggcacagaggatgccgctctgtgacaaatgtggcagtggcatagtcggtgctgtggtgaaggcgcgggataagtaccggcaccctgagtgcttcgtgtgtgccgactgcaacctcaacctcaagcaaaagggctacttcttcatagaaggggagctgtactgcgaaacccacgcaagagcccgcacaaaacccccaagaggctatgacacggtcactctgtatcccaaagcttaagtctctgcaggcgtggcacacgcacgcacccacccacgcgcacttacacgagaagacattcatggctttgggcagaaggattgtgcagattgtcaactccaaatctaaagtcaaggctttagacctttatcctattgtttattgaggaaaaggaatgggaggcaaatgcctgctatgtgaaaaaaacatacacttagctatgttttgcaactctttttggggctagcaataatgatatttaaagcaataattttttgtatgtcatactccacaatttacatgtatattacagccatcaaacacataaacatcaagatatttgaaggactctaattgtctttccttgacaa

SEQ ID NO: 286 - DNA, 1465 bp, Homo sapiens
  Genbank Accession No. AF007150
gaatcgatacggtgttttctgtccctcctactttccttcacaccagacagcccctcatgtctccaggacaggacaggactacagacaactctttctttaaataaattaagtctctacaataaaaacacaactgcaaagtaccttcataatatacatgtgtatgagcctcccttgtgcacgtatgtgtataccacatatatatgcatttagatatacatcacatgtgatatatctagatccatatataggtttgccttagatacctaaatacacatatattcagttctcagatgttgaagctgtcaccagcagctttgctcttaggagaaaagcatttcattagtgttgtattacttgagtctaagggtagatcacagactgtgtggtctcaactgaaaggatcacccttggcatctgtgtgcctggattcttccagaatgtctacaatgctaatctctcacatagaggttcccagcttcttaagaaccccttttggcacctaatcaaatttcaaaatccctccccccacatttcatacttttccccattctcaggacttttcaccatccatcacccacttatcccttcatttgacaccattcattaagtgccttctgtgtgtcagtccctggccactcactgcagttcaaggccccctttccgctctgctgtactcctcgcctacctactccttgccttttctgtcgcacagccccttctttccaggcgagattcctcagcttctgagtaggaaacactccgggctccaggtttctggttgggaagggaaggccaggccaaaagctccaccggccgtatagataatgtactcgcagttttgtatcttccattcatactttaacctacaggtcatttgagtcttcacacaaataataacctatctggccaggagaattatctcagaacagaagtcatcagatcatcagagcccccagatggctacagaccagagattccacgctctcaggctgactagagtccgcatctcatctccaaactacacttccctggagaacaagtgccacaaaaatgaaaacaggccacttctcaggagttgaataatcaggggtcaccggaccccttggttgatgcactgcagcatggtggctttctgagtcctgttggccaccaagtgtcagcctcagcactcccgggactattgccaagaaggggcaagggatgagtcaagaaggtgagacccttcccggtgggcacgtgggccaggctgtgtgagatgttggatgtttggtactgtccatgtctgggtgtgtgcctattacctcagcatttctcacaaagtgtaccatgtagcatgttttgtgtatataaaagggagggtttttttaaaaatatattcccagattatccttgtaatgacacgaatctgcaataaaagccatcagtgctatttggatgtatctacaaaaaaaaaaaaaaaaaaaaa

SEQ ID NO: 287 - DNA, 1484 bp, Homo sapiens
  Genbank Accession No. AF009314
  misc_feature (1)..(1475): n = a or c or g or t
tgtttctgtttctcttcaggcaagtccatagatagaggaaaatcagacacaggctggtgacaactggtatagatacagtgagcatggaatgagaaccacctacaacattgcctgattatttttaagtttatatcaaaactgcttcacaagttcacaaaagttgtcactcttaatttgggttaagaaaagtaatagtattatctctgctgaagttgattgtttttctcttttaccatgactgttggccaaaagcaagctgaacctctgcactttggaaacaaagcacagtatggaatctttaacccaagcacttagtttcaccactgaggattctacatcatctgcaaggaaaatgcacaaacttttgggtcccaatgttggattcttcaaaagtgcatagcaaaacttttgtgctatgccgcttgatgtaacttttaaagatgttatcaaatgttaaatgcctcattctgcgttaatttgctgttggctgttttgngaacacaaaataaacttgagattttttttttttttttttttgtgaaactcctccaaagccaatttcagcccttggtaagcttgcagacagttactgatcttaaatttaattttaaaagacaatgtatcttaattataatttagctttttaaaacaatgagatagctttacatttcccctttgtttgaatgagaaaatggatcttgggttgctatgctagaacacttgtagattgctgggtcctttgtaagggggccatggacacaccacactttctttcaatccttacatttgaagcattgatattcttcaaaaccttcttgttacatgtgcgcaatagaaatttctaatgttcatgacttttatctttcctgtccatcaattcactggttgtaaatgcttcctgagagctgtctaggtctgtatcccagattgttgcttaatgacatctgacagatgcattgttttctgaaatcagcttaagacaccaattgtggcaactggaaactcattacctgctgcattggatcaactatggaagttggagcaggggtgggcggaggtcacctaaccaatcaatggaaggcaactcacacctgctccaagcctcagctttgagaaacaaacacgtttataagaaaaaatatatagctattattacagaagtgaatatgttgtgctctcttactgctcttggtgcattgacagtttctgtatctcaaccctattcatctttatgaaaaagcattctgaagatctatcctcagcactgctgagtgtgcagtcacactttcctaccaacccccttcttaccatctctagctgccatttgtggggggaacaaaacaagggaatcctgattgtgtacagtataaattgtattatattttttgtacttatgttttatgtaaatagtttgtctcattcaattgtatgtgagcattgaaataaatcctaccatttaggggaaaaaaaaaaaaaaaaaaaaa

SEQ ID NO: 288 - DNA, 2580 bp, Homo sapiens
  Genbank Accession No. AF013570
ccagctgaacgaggagatggaggccaagcagaacctggagcgccacatctccactctcaacatccagctctccgactcgaagaagaagctgcaggactttgccagcaccgtggaagctctggaagaggggaagaagaggttccagaaggagatcgagaacctcacccagcagtacgaggagaaggcggccgcttatgataaactggaaaagaccaagaacaggcttcagcaggagctggacgacctggttgttgatttggacaaccagcggcaactcgtgtccaacctggaaaagaagcagaggaaatttgatcagttgttagccgaggagaaaaacatctcttccaaatacgcggatgagagggacagagctgaggcagaagccagggagaaggaaaccaaggccctgtccctggctcgggcccttgaagaggccttggaagccaaagaggaactcgagcggaccaacaaaatgctcaaagccgaaatggaagacctggtcagctccaaggatgacgtgggcaagaacgtccatgagctggagaagtccaagcgggccctggagacccagatggaggagatgaagacgcagctggaagagctggaggacgagctgcaagccacggaggacgccaaactgcggctggaagtcaacatgcaggcgctcaagggccagttcgaaagggatctccaagcccgggacgagcagaatgaggagaagaggaggcaactgcagagacagcttcacgagtatgagacggaactggaagacgagcgaaagcaacgtgccctggcagctgcagcaaagaagaagctggaaggggacctgaaagacctggagcttcaggccgactctgccatcaaggggagggaggaagccatcaagcacgtacgcaaactgcaggctcagatgaaggactttcaaagagagctggaagatgcccgtgcctccagagatgagatctttgccacagccaaagagaatgagaagaaagccaagagcttggaagcagacctcatgcagctacaagaggacctcgccgccgctgagagggctcgcaaacaagcggacctcgagaaggaggaactggcagaggagctggccagtagcctgtcgggaaggaacgcactccaggacgagaagcgccgcctggaggcccggatcgcccagctggaggaggagctggaggaggagcagggcaacatggaggccatgagcgaccgggtccgcaaagccacacagcaggccgagcagctcagcaacgagctggccacagagcgcagcacggcccagaagaatgagagtgcccggcagcagctcgagcggcagaacaaggagctccggagcaagctccacgagatggagggggccgtcaagtccaagttcaagtccaccatcgcggcgctggaggccaagattgcacagctggaggagcaggtcgagcaggaggccagagagaaacaggcggccaccaagtcgctgaagcagaaagacaagaagctgaaggaaatcttgctgcaggtggaggacgagcgcaagatggccgagcagtacaaggagcaggcagagaaaggcaatgccagggtcaagcagctcaagaggcagctggaggaggcagaggaggagtcccagcgcatcaacgccaaccgcaggaagctgcagcgggagctggatgaggccacggagagcaacgaggccatgggccgcgaggtgaacgcactcaagagcaagctcagagggccccccccacaggaaacttcgcagtgatgcaccaggcgaggaaacgagacctctttcgttccttctagaaggtctggaggacgtagagttattgaaaatgcagatggttctgaggaggaaacggacactcgagacgcagacttcaatggaaccaaggccagtgaataagcaactttctacagttttacaccacggcaagaaaaccaaaaaccaaaacaaacaaacaaaaaaaacccaacaacaacccagaacaaagcaaaacccagcagactgtacttagcattgtctaaatccattctcaaattccaaatatcacagacacccctcacacaaggaatataaaaaccaccaccctccagcctgggcaacgtagtaaaacctcatctatacaagaatttaaaaataagctgggcgtggtggtacacacctgtggcccagctactagggaggctgagccaggaagaacgctccagcccaggacttcgaggctgcaatgagctataattgcatcattgcactccagcctgggcaacagagaccctgtctcaaccaccaccaccaccaccacccctactacccctgtattcaaggtaaaaattgaagtttgtatgatgtaagagatgagaaaaacccaacaggaaacacagacacatcctccagttctatcaatggattgtgcagacactgagtttttagaaaaacatatccacggtaaccggtccctggcaattctgtttacatgaaatggggagaaagtcaccgaaatggtgccgccggccccactcccaattcattccctaacctgcaaacctttccaacttctcacgtcaggcctttga

SEQ ID NO: 289 - DNA, 1563 bp, Homo sapiens
  Genbank Accession No. AF014402
cctgtgggagagagcgccgggatccggacggggtagcaaccggggcaggccgtgccggctgaggaggtcctgaggctacagagctgccgcggctggcacacgagcgcctcggcactaaccgagtgttcgcgggggctgtgaggggagggccccgggcgccattgctggcggtgggagcgccgcccggtctcagcccgccctcggctgctctcctcctccggctgggaggggccgtatctcggggccgtcgccagccccggcccgggctcgataatcaagggcctcggccgtcgtcccgcacctcattccatcgcccttgccgggcagcccgggcagagaccatgtttgacaagacgcggctgccgtacgtggccctcgatgtgctctgcgtgttgctggctggattgccttttgcaattcttacttcaaggcatacccccttccaacgaggagtattctgtaatgatgagtccatcaagtacccttacaaagaagacaccataccttatgcgttattaggtggaataatcattccattcagtattatcgttattattcttggagaaaccctgtctgtttactgtaaccttttgcactcaaattcctttatcaggaataactacatagccactatttacaaagccattggaacctttttatttggtgcagctgctagtcagtccctgactgacattgccaagtattcaataggcagactgcggcctcacttcttggatgtttgtgatccagattggtcaaaaatcaactgcagcgatggttacattgaatactacatatgtcgagggaatgcagaaagagttaaggaaggcaggttgtccttctattcaggccactcttcgttttccatgtactgcatgctgtttgtggcactttatcttcaagccaggatgaagggagactgggcaagactcttacgccccacactgcaatttggtcttgttgccgtatccatttatgtgggcctttctcgagtttctgattataaacaccactggagcgatgtgttgactggactcattcagggagctctggttgcaatattagttgctgtatatgtatcggatttcttcaaagaaagaacttcttttaaagaaagaaaagaggaggactctcatacaactctgcatgaaacaccaacaactgggaatcactatccgagcaatcaccagccttgaaaggcagcagggtgcccaggtgaagctggcctgttttctaaaggaaaatgattgccacaaggcaagaggatgcatctttcttcctggtgtacaagcctttaaagacttctgctgctgatatgcctcttggatgcacactttgtgtgtacatagttacctttaactcagtggttatctaatagctctaaactcattaaaaaaactccaagccttccaccaaaacagtgccccacctgtatacatttttattaaaaaaatgtaatgcttatgtataaacatgtatgtaatatgctttctatgaatgatgtttgatttaaatataatacatattaaaatgtatgggagaaccaaaaaaaaaaaaaaaaaa

SEQ ID NO: 290 - DNA, 1642 bp, Homo sapiens
  Genbank Accession No. AF016004
taaaaagcaaaagaattccggggtagttatgggaaagaacctagagagcaagaagaaaagaggaatggtgcccgaatctgggagagatagacttcaggatggccagtcattgaatgggggataggtgaagaacagagcctctcaatcagacgggtgtaaataagagacggaggggagtccaaaagaaaaggaagaggaggaaaaacaagtgtgtgttggggggaacagggggaaaagcatttttggtggatggtatgaagccagccatggaaactgcagccgaggaaaatactgaacaaagccaagagagaaaaggctgctttgaatgctgcatcaagtgtctgggaggagtcccctacgcctccctggtggccaccatcctctgcttctccggggtggccttattctgcggctgtgggcatgtggctctcgcaggcaccgtggcgattcttgagcaacacttctccaccaacgccagtgaccatgccttgctgagcgaggtgatacaactgatgcagtatgtcatctatggaattgcgtcctttttcttcttgtatgggatcattctgttggcagaaggcttttacaccacaagtgcagtgaaagaactgcacggtgagtttaaaacaaccgcttgtggccgatgcatcagtggaatgttcgttttcctcacctatgtgcttggagtggcctggctgggtgtgtttggtttctcagcggtgcccgtgtttatgttctacaacatatggtcaacttgtgaagtcatcaagtcaccgcagaccaacgggaccacgggtgtggagcagatctgtgtggatatccgacaatacggtatcattccttggaatgctttccccggaaaaatatgtggctctgccctggagaacatctgcaacacaaacgagttctacatgtcctatcacctgttcattgtggcctgtgcaggagctggtgccaccgtcattgccctgctgatctacatgatggctactacatataactatgcggttttgaagtttaagagtcgggaagattgctgcactaaattctaaattgcataaggagttttagagagctatgctctgtagcatgaaatatcactgacactccagactaaagcagagtctaggtttctgcaattttgttacagtaatttgtaaatagctttagtaaactcaccttgcatggtagattaataagatgacttactgtacatgaattacacaataatgagatctggtggctatttccacattttgaaaaggattcagttatttactgacagtggtgagcatcctttttaaaataatgttctgatacttaaacattagagagcagtatctttaaatgaattattaacactttggaatacttacattttctgttatttttgattgcctgataaccagtttcaatgatgaaaatgaaaacaagtgctgaagatgaaatggaagagaaccgttttaatctggattttgttttgtcacacctggaaaatactttgcaaatatgttctaaattgaaaacaatttttttatgatcacatggttcactaccaaatgaccctcaaataagccagatgaaaatttgaagaaaaaggtcacccagttctctggaaaaaaaaaaaaaaaaaaaaaaaaaa

SEQ ID NO: 291 - DNA, 2238 bp, Homo sapiens
  Genbank Accession No. AF022797
gtccttcggtgtctgggtgtggtgagtagaggtgtgtgtcacaaagtacagaccattgtgtgtgacaaagcccatcgtgtgtctgtgtgtgtctttatccacgtggatggacgtctctttcttgctctgccccaagacacaccctagcccctccttattctcaaaagggggagctggggagcctccccctaccctggggcctcccctgcccctccccgccctgcctggccgtcaccactccccagagggcacagggctctgctgtgcctcagagcaaaagtcccagagccagcagagcaggctgacgacctgcaagccacagtggctgccctgtgcgtgctgcgaggtgggggaccctgggcaggaagctggctgagccccaagaccccgggggccatgggcggggatctggtgcttggcctgggggccttgagacgccgaaagcgcttgctggagcaggagaagtctctggccggctgggcactggtgctggcaggaactggcattggactcatggtgctgcatgcagagatgctgtggttcggggggtgctcgtgggcgctctacctgttcctggttaaatgcacgatcagcatttccaccttcttactcctctgcctcatcgtggcctttcatgccaaagaggtccagctgttcatgaccgacaacgggctgcgggactggcgcgtggcgctgaccgggcggcaggcggcgcagatcgtgctggagctggtggtgtgtgggctgcacccggcgcccgtgcggggcccgccgtgcgtgcaggatttaggggcgccgctgacctccccgcagccctggccgggattcctgggccaaggggaagcgctgctgtccctggccatgctgctgcgtctctacctggtgccccgcgccgtgctcctgcgcagcggcgtcctgctcaacgcttcctaccgcagcatcggcgctctcaatcaagtccgcttccgccactggttcgtggccaagctttacatgaacacgcaccctggccgcctgctgctcggcctcacgcttggcctctggctgaccaccgcctgggtgctgtccgtggccgagaggcaggctgttaatgccactgggcacctttcagacacactttggctgatccccatcacattcctgaccatcggctatggtgacgtggtgccgggcaccatgtggggcaagatcgtctgcctgtgcactggagtcatgggtgtctgctgcacagccctgctggtggccgtggtggcccggaagctggagtttaacaaggcagagaagcacgtgcacaacttcatgatggatatccagtataccaaagagatgaaggagtccgctgcccgagtgctacaagaagcctggatgttctacaaacatactcgcaggaaggagtctcatgctgcccgcaggcatcagcgcaagctgctggccgccatcaacgcgttccgccaggtgcggctgaaacaccggaagctccgggaacaagtgaactccatggtggacatctccaagatgcacatgatcctgtatgacctgcagcagaatctgagcagctcacaccgggccctggagaaacagattgacacgctggcggggaagctggatgccctgactgagctgcttagcactgccctggggccgaggcagcttccagaacccagccagcagtccaagtagctggacccacgaggaggaaccaggctactttccccagtactgaggtggtggacatcgtctctgccactcctgacccagccctgaacaaagcacctcaagtgcaaggaccaaagggggccctggcttggagtgggttggcttgctgatggctgctggaggggacgctggctaaagtgggtaggccttggcccacctgaggccccaggtgggaacatggtcacccccactctgcataccctcatcaaaaacactctcactatgctgctatggacgacctccagctctcagttacaagtgcaggcgactggaggcaggactcctgggtccctgggaaagagggtactaggggcccggatccaggattctgggaggcttcagttaccgctggccgagctgaagaactgggtatgaggctggggcggggctggaggtggcgccccctggtgggacaacaaagaggacaccatttttccagagctgcagagagcacctggtggggaggaagaagtgtaactcaccagcctctgctcttatctttgtaataaatgttaaagccag

SEQ ID NO: 292 - DNA, 3794 bp, Homo sapiens
  Genbank Accession No. AF027208
ccaagttctacctcatgtttggaggatcttgctagctatggccctcgtactcggctccctgttgctgctggggctgtgcgggaactccttttcaggagggcagccttcatccacagatgctcctaaggcttggaattatgaattgcctgcaacaaattatgagacccaagactcccataaagctggacccattggcattctctttgaactagtgcatatctttctctatgtggtacagccgcgtgatttcccagaagatactttgagaaaattcttacagaaggcatatgaatccaaaattgattatgacaagccagaaactgtaatcttaggtctaaagattgtctactatgaagcagggattattctatgctgtgtcctggggctgctgtttattattctgatgcctctggtggggtatttcttttgtatgtgtcgttgctgtaacaaatgtggtggagaaatgcaccagcgacagaaggaaaatgggcccttcctgaggaaatgctttgcaatctccctgttggtgatttgtataataataagcattggcatcttctatggttttgtggcaaatcaccaggtaagaacccggatcaaaaggagtcggaaactggcagatagcaatttcaaggacttgcgaactctcttgaatgaaactccagagcaaatcaaatatatattggcccagtacaacactaccaaggacaaggcgttcacagatctgaacagtatcaattcagtgctaggaggcggaattcttgaccgactgagacccaacatcatccctgttcttgatgagattaagtccatggcaacagcgatcaaggagaccaaagaggcgttggagaacatgaacagcaccttgaagagcttgcaccaacaaagtacacagcttagcagcagtctgaccagcgtgaaaactagcctgcggtcatctctcaatgaccctctgtgcttggtgcatccatcaagtgaaacctgcaacagcatcagattgtctctaagccagctgaatagcaaccctgaactgaggcagcttccacccgtggatgcagaacttgacaacgttaataacgttcttaggacagatttggatggcctggtccaacagggctatcaatcccttaatgatatacctgacagagtacaacgccaaaccacgactgtcgtagcaggtatcaaaagggtcttgaattccattggttcagatatcgacaatgtaactcagcgtcttcctattcaggatatactctcagcattctctgtttatgttaataacactgaaagttacatccacagaaatttacctacattggaagagtatgattcatactggtggctgggtggcctggtcatctgctctctgctgaccctcatcgtgattttttactacctgggcttactgtgtggcgtgtgcggctatgacaggcatgccaccccgaccacccgaggctgtgtctccaacaccggaggcgtcttcctcatggttggagttggattaagtttcctcttttgctggatattgatgatcattgtggttcttacctttgtctttggtgcaaatgtggaaaaactgatctgtgaaccttacacgagcaaggaattattccgggttttggatacaccctacttactaaatgaagactgggaatactatctctctgggaagctatttaataaatcaaaaatgaagctcacttttgaacaagtttacagtgactgcaaaaaaaatagaggcacttacggcactcttcacctgcagaacagcttcaatatcagtgaacatctcaacattaatgagcatactggaagcataagcagtgaattggaaagtctgaaggtaaatcttaatatctttctgttgggtgcagcaggaagaaaaaaccttcaggattttgctgcttgtggaatagacagaatgaattatgacagctacttggctcagactggtaaatcccccgcaggagtgaatcttttatcatttgcatatgatctagaagcaaaagcaaacagtttgcccccaggaaatttgaggaactccctgaaaagagatgcacaaactattaaaacaattcaccagcaacgagtccttcctatagaacaatcactgagcactctataccaaagcgtcaagatacttcaacgcacagggaatggattgttggagagagtaactaggattctagcttctctggattttgctcagaacttcatcacaaacaatacttcctctgttattattgaggaaactaagaagtatgggagaacaataataggatattttgaacattatctgcagtggatcgagttctctatcagtgagaaagtggcatcgtgcaaacctgtggccaccgctctagatactgctgttgatgtctttctgtgtagctacattatcgaccccttgaatttgttttggtttggcataggaaaagctactgtatttttacttccggctctaatttttgcggtaaaactggctaagtactatcgtcgaatggattcggaggacgtgtacgatgatgttgaaactatacccatgaaaaatatggaaaatggtaataatggttatcataaagatcatgtatatggtattcacaatcctgttatgacaagcccatcacaacattgatagctgatgttgaaactgcttgagcatcaggatactcaaagtggaaaggatcacagatttttggtagtttctgggtctacaaggactttccaaatccaggagcaacgccagtggcaacgtagtgactcaggcgggcaccaaggcaacggcaccattggtctctgggtagtgctttaagaatgaacacaatcacgttatagtccatggtccatcactattcaaggatgactccctcccttcctgtctatttttgttttttacttttttacactgagtttctatttagacactacaacatatggggtgtttgttcccattggatgcatttctatcaaaactctatcaaatgtgatggctagattctaacatattgccatgtgtggagtgtgctgaacacacaccagtttacaggaaagatgcattttgtgtacagtaaacggtgtatataccttttgttaccacagagttttttaaacaaatgagtattataggactttcttctaaatgagctaaataagtcaccattgacttcttggtgctgttgaaaataatccattttcactaaaagtgtgtgaaacctacagcatattcttcacgcagagattttcatctattatactttatcaaagattggccatgttccacttggaaatggcatgcaaaagccatcatagagaaacctgcgtaactccatctgacaaattcaaaagagagagagagatcttgagagagaaatgctgttcgttcaaaagtggagttgttttaacagatgccaattacggtgtacagtttaacagagttttctgttgcattaggataaacattaattggagtgcagctaacatgagtatcatcagactagtatcaagtgttctaaaatgaaatatgagaagatcctgtcacaattcttagatctggtgtccagcatggatgaaacctttgagtttggtccctaaatttgcatgaaagcacaaggtaaatattcatttgcttcaggagtttcatgttggatctgtcattatcaaaagtgatcagcaatgaagaactggtcggacaaaatttaacgttgatgtaatggaattccagatgtaggcattccccccaggtcttttcatgtgcagattgcagttctgattcatttgaataaaaaggaacttgg

SEQ ID NO: 293 - DNA, 4079 bp, Homo sapiens
  Genbank Accession No. AF032108
ggagcggcgggcgggcgggagggctggcggggcgaacgtctgggagacgtctgaaagaccaacgagactttggagaccagagacgcgcctggggggacctggggcttggggcgtgcgagatttcccttgcattcgctgggagctcgcgcagggatcgtcccatggccggggctcggagccgcgacccttggggggcctccgggatttgctacctttttggctccctgctcgtcgaactgctcttctcacgggctgtcgccttcaatctggacgtgatgggtgccttgcgcaaggagggcgagccaggcagcctcttcggcttctctgtggccctgcaccggcagttgcagccccgaccccagagctggctgctggtgggtgctccccaggccctggctcttcctgggcagcaggcgaatcgcactggaggcctcttcgcttgcccgttgagcctggaggagactgactgctacagagtggacatcgaccagggagctgatatgcaaaaggaaagcaaggagaaccagtggttgggagtcagtgttcggagccaggggcctgggggcaagattgttacctgtgcacaccgatatgaggcaaggcagcgagtggaccagatcctggagacgcgggatatgattggtcgctgctttgtgctcagccaggacctggccatccgggatgagttggatggtggggaatggaagttctgtgagggacgcccccaaggccatgaacaatttgggttctgccagcagggcacagctgccgccttctcccctgatagccactacctcctctttggggccccaggaacctataattggaaggggttgctttttgtgaccaacattgatagctcagaccccgaccagctggtgtataaaactttggaccctgctgaccggctcccaggaccagccggagacttggccctcaatagctacttaggcttctctattgactcggggaaaggtctggtgcgtgcagaagagctgagctttgtggctggagccccccgcgccaaccacaagggtgctgtggttatcctgcgcaaggacagcgccagtcgcctggtgcccgaggttatgctgtctggggagcgcctgacctccggctttggctactcactggctgtggctgacctcaacagtgatggctggccagacctgatagtgggtgccccctacttctttgagcgccaagaagagctggggggtgctgtgtatgtgtacttgaaccaggggggtcactgggctgggatctcccctctccggctctgcggctcccctgactccatgttcgggatcagcctggctgtcctgggggacctcaaccaagatggctttccagatattgcagtgggtgccccctttgatggtgatgggaaagtcttcatctaccatgggagcagcctgggggttgtcgccaaaccttcacaggtgctggagggcgaggctgtgggcatcaagagcttcggctactccctgtcaggcagcttggatatggatgggaaccaataccctgacctgctggtgggctccctggctgacaccgcagtgctcttcagggccagacccatcctccatgtctcccatgaggtctctattgctccacgaagcatcgacctggagcagcccaactgtgctggcggccactcggtctgtgtggacctaagggtctgtttcagctacattgcagtccccagcagctatagccctactgtggccctggactatgtgttagatgcggacacagaccggaggctccggggccaggttccccgtgtgacgttcctgagccgtaacctggaagaacccaagcaccaggcctcgggcaccgtgtggctgaagcaccagcatgaccgagtctgtggagacgccatgttccagctccaggaaaatgtcaaagacaagcttcgggccattgtagtgaccttgtcctacagtctccagacccctcggctccggcgacaggctcctggccaggggctgcctccagtggcccccatcctcaatgcccaccagcccagcacccagcgggcagagatccacttcctgaagcaaggctgtggtgaagacaagatctgccagagcaatctgcagctggtccacgcccgcttctgtacccgggtcagcgacacggaattccaacctctgcccatggatgtggatggaacaacagccctgtttgcactgagtgggcagccagtcattggcctggagctgatggtcaccaacctgccatcggacccagcccagccccaggctgatggggatgatgcccatgaagcccagctcctggtcatgcttcctgactcactgcactactcaggggtccgggccctggaccctgcggagaagccactctgcctgtccaatgagaatgcctcccatgttgagtgtgagctggggaaccccatgaagagaggtgcccaggtcaccttctacctcatccttagcacctccgggatcagcattgagaccacggaactggaggtagagctgctgttggccacgatcagtgagcaggagctgcatccagtctctgcacgagcccgtgtcttcattgagctgccactgtccattgcaggaatggccattccccagcaactcttcttctctggtgtggtgaggggcgagagagccatgcagtctgagcgggatgtgggcagcaaggtcaagtatgaggtcacggtttccaaccaaggccagtcgctcagaaccctgggctctgccttcctcaacatcatgtggcctcatgagattgccaatgggaagtggttgctgtacccaatgcaggttgagctggagggcgggcaggggcctgggcagaaagggctttgctctcccaggcccaacatcctccacctggatgtggacagtagggataggaggcggcgggagctggagccacctgagcagcaggagcctggtgagcggcaggagcccagcatgtcctggtggccagtgtcctctgctgagaagaagaaaaacatcaccctggactgcgcccggggcacggccaactgtgtggtgttcagctgcccactctacagctttgaccgcgcggctgtgctgcatgtctggggccgtctctggaacagcacctttctggaggagtactcagctgtgaagtccctggaagtgattgtccgggccaacatcacagtgaagtcctccataaagaacttgatgctccgagatgcctccacagtgatcccagtgatggtatacttggaccccatggctgtggtggcagaaggagtgccctggtgggtcatcctcctggctgtactggctgggctgctggtgctagcactgctggtgctgctcctgtggaagatgggattcttcaaacgggcgaagcaccccgaggccaccgtgccccagtaccatgcggtgaagattcctcgggaagaccgacagcagttcaaggaggagaagacgggcaccatcctgaggaacaactggggcagcccccggcgggagggcccggatgcacaccccatcctggctgctgacgggcatcccgagctgggccccgatgggcatccagggccaggcaccgcctaggttcccatgtcccagcctggcctgtggctgccctccatcccttccccagagatggctccttgggatgaagagggtagagtgggctgctggtgtcgcatcaagatttggcaggatcggcttcctcaggggcacagacctctcccacccacaagaactcctcccacccaacttccccttagagtgctgtgagatgagagtgggtaaatcagggacagggccatggggtagggtgagaagggcaggggtgtcctgatgcaaaggtggggagaagggatcctaatcccttcctctcccattcaccctgtgtaacaggaccccaaggacctgcctccccggaagtgccttaacctagagggtcggggaggaggttgtgtcactgactcaggctgctccttctctagtttcccctctcatctgaccttagtttgctgccatcagtctagtggtttcgtggtttcgtctatttattaaaaaatatttgagaacaaaaaaaaaaaaaaaaaa

SEQ ID NO: 294 - DNA, 2135 bp, Homo sapiens
  Genbank Accession No. AF039843
ggcacgagggtaaggccgttttcttttcccattcgctcatctgccaggaaaagggacttgccgttggcgcttcggcctcttgttcattgagaaaaaagaggaaatactccgcgtgcgcttgtagaaggggagtcgtctccagctccgaaccccggagtgttcatcagcggggaatctggctccgaattctctttttttctcccgccgattgctcggaagttggtctaaagcagaggttggaaagaaaggaaaaaagtttgcatcgagactggatttatttgcacatcgcagaaagaagagaatccaagggagaggggttggtgcaaagccgcgatcacggagttcagatgtgttctaagcctgctggagtgaccacacttccaagacctgatggaggccagagctcagagtggcaacgggtcgcagcccttgctgcagacgccccgtgacggtggcagacagcgtggggagcccgaccccagagacgccctcacccagcaggtacatgtcttgtctctggatcagatcagagccatccgaaacaccaatgagtacacagaggggcctactgtcgtcccaagacctgggctcaagcctgctcctcgcccctccactcagcacaaacacgagagactccacggtctgcctgagcaccgccagcctcctaggctccagcactcgcaggtccattcttctgcacgagcccctctgtccagatccataagcacggtcagctcagggtcgcggagcagtacgaggacaagtaccagcagcagctcctctgaacagagactgctaggatcatccttctcctccgggcctgttgctgatggcataatccgggtgcaacccaaatctgagctcaagccaggtgagcttaagccactgagcaaggaagatttgggcctgcacgcctacaggtgtgaggactgtggcaagtgcaaatgtaaggagtgcacctacccaaggcctctgccatcagactggatctgcgacaagcagtgcctttgctcggcccagaacgtgattgactatgggacttgtgtatgctgtgtgaaaggtctcttctatcactgttctaatgatgatgaggacaactgtgctgacaacccatgttcttgcagccagtctcactgttgtacacgatggtcagccatgggtgtcatgtccctctttttgccttgtttatggtgttaccttccagccaagggttgccttaaattgtgccaggggtgttatgaccgggttaacaggcctggttgccgctgtaaaaactcaaacacagtttgctgcaaagttcccactgtcccccctaggaactttgaaaaaccaacatagcatcattaatcaggaatattacagtaatgaggattttttctttctttttttaatacacatatgcaaccaactaaacagttataatcttggcactgttaatcgaaagttgggatagtctttgctgtttgcggtgaaatgctttttgtccatgtgccgttttaactgatatgcttgttagaactcagctaatggagctcaaagtatgagatacagaacttggtgacccatgtattgcataagctaaagcaacacagacactcctaggcaaagtttttgtttgtgaatagtacttgcaaaacttgtaaattagcagatgacttttttccattgttttctccagagagaatgtgctatatttttgtatatacaataatatttgcaactgtgaaaaacaagttgtgccatactacatggcacagacacaaaatattatactaatatgttgtacattcggaagaatgtgaatcaatcagtatgtttttagattgtattttgccttacagaaagcctttattgtaagactctgatttccctttggacttcatgtatattgtacagttacagtaaaattcaacctttattttctaattttttcaacatattgtttagtgtaaagaatatttatttgaagttttattattttataaaaaagaatatttattttaagaggcatcttacaaattttgccccttttatgaggatgtgatagttgctgcaaatgaggggttacagatgcatatgtccaatataaaatagaaaatatattaacgtttgaaattaaaaaaaaaaaaaaaaaa

SEQ ID NO: 295 - DNA, 4606 bp, Homo sapiens
  Genbank Accession No. AF044311
agggagatccagctccgtcctgcctgcagcagcccaaccctgcacacccaccatggatgtcttcaagaagggcttctccatcgccaaggagggcgtggtgggtgcggtggaaaagaccaagcagggggtgacggaagcagctgagaagaccaaggagggggtcatgtatgtgggtaagtggggcatggcagggtgggacagtgtggtggccaaagggtgagtgcccagttaccttcgccagaccttactccccagccccagggaggcattttgggagggggcgaggccctggctatcaaggtggggtctccacaccctggagcacccacaatgccctgtgcacacctatgtgtgtttgtctttggcctcctcggggcctctgggtgtcagagacagcagacagggctggctacctgtctgtgcacgcacacacacattcccaagcataccaccctcccctgagcgtggagcccctgaagccatgagcagcctgtgctcaggtggcccccaccctctccacacgggagcggctacagccaggtcacggatcccctccctccccagagagaaggggcaggctgggggatgaaacctaggctcagtgttccctcccccgcatcctctcctggcactctccagaggaggaaggggaggtcaagccaatgactcagctctggcccatcctgtcctgttgctgcttctgaggcccggccacacccgggcagggggtggaccctgggtttagccagtgtccctacctcaggcctgctctctcttgtcccccacattctgtcctgtccccttcccatccatccacttcttccagacacagcaggaagaggccctctgaaggggccgccggcccccagacaccatccttacccccccaccgaccccacagtttgtccagctgttctgttgtgtttgtcctgaccgcccccaacacctcgagggaggtctgggctgacagctccatttcctccccaggagccaagaccaaggagaatgttgtacagagcgtgacctcaggtgagaagccccagggccaggggacacatgggggataggacccctggggctcctgcatcctagtgctggggctcaaacctagagtcctgccttacccccaactggggtcccaagccctacagacccctgcagaccataaggataaagtagggtgggcgtgtctttacccccaccagcatcagaggtgccctggagtcagagggagcaggggagggtcccagcagggccagggctctgagctcctgggaagggggtgcgagcctgactccagcaggcctgccttggggctggggctggggtggaggccagccagtgtcctcccatagtggccgagaagaccaaggagcaggccaacgcggtgagcgaggctgtggtgagcagcgtcaacactgtggccaccaagaccgtggaggaggcggagaacatcgcggtcacctccggggtggtgcgcaaggtgagccccggccctcaaacctgcccagtcctctcctgggcccagaaaggctgctgggcggaggcggcatcactccactccacaccccaggaaacaacacggggggctgcggctggcttcagtttcagtacccactgagcgccggcatggggtggggtccatgcttgctgttcgacctgcattcgggtctggaatcaccacaaccaccccttcgggggacttgggagcccatctcatagacaaggaaagtgaggctcaaaaccacatcttccggacggctctcagcacttaagaaacaccccattttataagtgaaaacaggatcccacacggtgacaggcaccctcccgggcagtggtcaccaggccgggggctgaataacaccagccccgcccccagggcctacctccctccctgggctgggcggggcacctgcctcctgctgggagcctcagggaagtacgtccctagtggtaagaaagcagtgctgcttctgacctaccctctgcagctgcctttgtgtgtgtgtgcacgtgtgttgagtgaacatgtgggtgcatttgtgagaatgtgtgggtgtacatgcgtgtgaatgtacacatgcgtgtgcggcccaatagcaaacagcacaggagcagtggggcgcaccccagggacgggtgttggctgggtgagctgtcccagcacctgtgacacagcaagctctgctttacgcattgtacccttattagttcatttaatagacacaaaatccatgagacggtgtggaaactaaggcccagagagattaatgtgcccaaggtcccatggctagttcatgtgagcttggaattccctgagcagcctgtactctgagagacctgtggcagtgtaagtggtggcctgggctaagatccctacctgggggtggggcgggggagcaatgtccagctctcctacctgctccaggcctcctaggtggtggagtctgaggctctgagcactgagaatccctgcgttaggagtgggtgggtggaagggtgggggctgccctactcctcttggctctggggcgatgcccaggtgtctgcttccagggccagcacagggtctccatgtccttggaactggcagccgctccctctcctagttctcctttctcgttgtatgaccttgagaagcaaaggaacctctctgggcctccgtgttctcatctgcaagatgggggtgagagtgtcggcttccctgggctgtgtgatgaggcagggccatgacttccatgaagcaattctcctggtctatgtgagcacccagcagaggaaggtgaccatcatcatcatcatcatcatgtgtcccaggcagaacacatagagccccagggggctcctccctcctcacccccagcaaaagaggccctggggtgagggtgcccgggcattccttgtgaatcccggagcagggctagtgagcccttggagccacctcgagggagactcatttcctggtgacaccccaaaaccagtcacgactcatctcccagtgaactgtgaaaggcctcagcagggactatctgaccactcatacccctggcctcatcatcagccttagggcagcaggactcagcaggtggccacctgccctgcccctggatagcctggccgactcccgccagcacagcactgcccttttatgccccactccgccaaggggcaggatggccctggggcaacacagaggtgacagtatccccgccttcccccccgtcccccgccagaggcaggtgctgaggccagagtgcagggcaatcaccagtgtggtcctacacacccagctgtcatgatatctcacgcaagtgtctggccggcatggagtgcaggagatagaagatgggaagtgagagaggactgtgtaacctctgttggccctgaccagcctgagcccagagcctgtccaggaggcaaagagagggagccatgctcctgtggactgaagtgggcctgaagcaagcctgatctgatgccaacacaccccaccactttgagttggaaggccctgagctgcatgccaagcctccctggcctcagagtccctatgtgaaccccaatcagtcttccttgtagggctactgaggtggggtcagacctggggcttcaggggcttttgcccattttaacccccattccaccttaccccacccaggttcttcatcagtgaagcccaactaggggcttcccagagactggggaccagcttgaggggtgaagctgggctccagggtacttggtgcccctggaaggcctcggcatcatcagagccccgggtattgtctgaattgcacgcccccaatacctccagcccctccaagtacaacaaggccacgaggggcctgtgctcttccttgaggccagggtagacaaggccctggttgcagggcagctaggggtctctgcattctccacatggtctcatgcccccttttgtcccctacaggaggacttgaggccatctgccccccaacaggagggtgtggcatccaaagagaaagaggaagtggcagaggaggtaggagctgggctcctggggtgcaccatggggggttccttggtagggaccccatcccccacagacgcactgcttccctcctgggctcccagggcccagaggggcctcctgaccttccacagcccctacagggactgtgtacagggctaaccctgaacctgagtgggaggtccccccacggatgacccctcaggcatggggcacagaagacaacttttctcagcccactcagggtggcccattaaggctggggcctggagctgggtgtgcaggtcattctctctcccaggcccagagtgggggagactagagggctacaggccagcgtggatgacctgaagagcgctcctctgccttggacaccatcccctcctagcacaaggagtgccgccttgagtgacatgcggctgcccacgctcctgccctcgtcttcctggccacccttggcctgtccacctgtgctgctgcaccaacctcactgccctccctcggccccacccaccctctggtccttctgaccccacttatgctgctgtgaattttttttttaaatgattccaaataaaacttgagcccactcct

SEQ ID NO: 296 - DNA, 1524 bp, Homo sapiens
  Genbank Accession No. AF052124
gcagagcacagcatcgtcgggaccagactcgtctcaggccagttgcagccttctcagccaaacgccgaccaaggaaaactcactaccatgagaattgcagtgatttgcttttgcctcctaggcatcacctgtgccataccagttaaacaggctgattctggaagttctgaggaaaagcagctttacaacaaatacccagatgctgtggccacatggctaaaccctgacccatctcagaagcagaatctcctagccccacagacccttccaagtaagtccaacgaaagccatgaccacatggatgatatggatgatgaagatgatgatgaccatgtggacagccaggactccattgactcgaacgactctgatgatgtagatgacactgatgattctcaccagtctgatgagtctcaccattctgatgaatctgatgaactggtcactgattttcccacggacctgccagcaaccgaagttttcactccagttgtccccacagtagacacatatgatggccgaggtgatagtgtggtttatggactgaggtcaaaatctaagaagtttcgcagacctgacatccagtaccctgatgctacagacgaggacatcacctcacacatggaaagcgaggagttgaatggtgcatacaaggccatccccgttgcccaggacctgaacgcgccttctgattgggacagccgtgggaaggacagttatgaaacgagtcagctggatgaccagagtgctgaaacccacagccacaagcagtccagattatataagcggaaagccaatgatgagagcaatgagcattccgatgtgattgatagtcaggaactttccaaagtcagccgtgaattccacagccatgaatttcacagccatgaagatatgctggttgtagaccccaaaagtaaggaagaagataaacacctgaaatttcgtatttctcatgaattagatagtgcatcttctgaggtcaattaaaaggagaaaaaatacaatttctcactttgcatttagtcaaaagaaaaaatgctttatagcaaaatgaaagagaacatgaaatgcttctttctcagtttattggttgaatgtgtatctatttgagtctggaaataactaatgtgtttgataattagtttagtttgtggcttcatggaaactccctgtaaactaaaagcttcagggttatgtctatgttcattctatagaagaaatgcaaactatcactgtattttaatatttgttattctctcatgaatagaaatttatgtagaagcaaacaaaatacttttacccacttaaaaagagaatataacattttatgtcactataatcttttgttttttaagttagtgtatattttgttgtgattatctttttgtggtgtgaataaatcttttatcttgaatgtaataagaatttggtggtgtcaattgcttatttgttttcccacggttgtccagcaattaataaaacataaccttttttactgcctaaaaaaaaaaaaaaaaaaaa

SEQ ID NO: 297 - DNA, 1508 bp, Homo sapiens
  Genbank Accession No. AF052142
gcagagcaggtggtagtgggacaggacaattggagcacaggaatgttaacatgtatgacaggggaccagtagggtggtttccctctcaggcccagcagcccattgacagcattagactggcggcatggtgcttttctgagcagatcaatactctgcagactcgaaaaaacatcacatacattcttggaacttcccagtggtttaatctatgtgcatggttagggagccaggtctggaatattcagtttccctgcccctgttaaagaatcagaggttgggcagtcatcaaattcatcataaagacatgggcaagtgtgtctgtggtttccaaggcccccctatggagaatccaaaagtattttccattgccgtgctctttgaatgcagacttctatttccagaagtgacagcacaagtctgagttgctgtttggtctggtgacctcagacacactaatttgaattgaaagctaagagtaaaaatttgctggttacaggcgagtcatactcttgcaagtagttagcaaagggaggcccaaattctcaaggttgttgatggggaacttgccactaagagaaggcagagaggtccctagtgggtatatttgctgccaagccacttgccaaagaagaggaaccacagaaagagagacatcatgaccaggagaaaaatgtgactagacatgctaacctccaggtttttatatatgacttgagtctgctgtaattggcagcagaaatccaaatttgtatggtagaccaaaaagaaccaaatccatagggtgaaattttgagacctagactctgtaaaaataatcctagtcttcctccaggggtcagttcctcacagtggttctgtaccaaaacttgccaaattcctccatggccaagtgttaaaatctgtgtttggaaaatagcgaattaacctaagacacagaaggcagactgggtgaggagacctagcatgccctattggcagtgctcaggagctgcatcccacttttccctgctctgaatcgaagtcctagttccttcctttgattctcctttggtaggtggaatcagttaatgttttagaaacctgcctggctctgcccttagtcatgacatctcgctgagccagacccactctgttccttggaacctagagctggagtgaggagtagaggtctccggctattccagaaagaaaagtgagccacatgcaggctgatgaatgccgacacttccagaatgtatagaaatagtccctgtcctggcctgccactgaccctgtctgtattttctcggaggttgtttttctccttctccttcccaggaaggtctttgtatgtcgaatccagtgcactcaagtttggccaagggactccacagcacccagaagactgcatgcctcaaggtttatgtcactcctctgctgggctgttcattgtcattgctgtgttcagggacctttggaaataaaacctgttctgtcccaaaaaaataaaaaaaaaaaaaaaaaaaaaa

SEQ ID NO: 298 - DNA, 2398 bp, Homo sapiens
  Genbank Accession No. AF052389
gcccgtgctccctccctccctccctctttccctccctcctctcctctccctctcctctcctgctatagagggctccgacagcagttcccagccagcgtgttcagcctgcctgcctgcctgcctctgtgtgtgtgtgagcgtgtgtgcgtgcgtctactttgtactgggaagaacacagcccatgtgctctgcatggacgttactgatactctgtttagcttgattttcgaaaagcaggcaggcatacaccatacatggtacagccagagtaccgaatctatgagatgaacaagagactgcagtctcgcacagaggatagtgacaacctctggtgggacgcctttgccactgaattttttgaagatgacgccacattaaccctttcattttgtttggaagatggaccaaagcgatacactatcggcaggaccctcatcccccgttactttagcactgtgtttgaaggaggggtgaccgacctgtattacattctcaaacactcgaaagagtcataccacaactcatccatcacggtggactgcgaccagtgtaccatggtcacccagcacgggaagcccatgtttaccaaggtatgtacagaaggcagactgatcttggagttcacctttgatgatctcatgagaatcaaaacatggcactttaccattagacaataccgagagttagtcccgagaagcatcctagccatgcatgcacaagatcctcaggtcctggatcagctgtccaaaaacatcaccaggatggggctaacaaacttcaccctcaactacctcaggttgtgtgtaatattggagccaatgcaggaactgatgtcgagacataaaacttacaacctcagtccccgagactgcctgaagacctgcttgtttcagaagtggcagaggatggtggctccgccagcagaacccacaaggcaaccaacaaccaaacggagaaaaaggaaaaattccaccagcagcacttccaacagcagcgctgggaacaatgcaaacagcactggcagcaagaagaagaccacagctgcaaacctgagtctgtccagtcaggatgtgatggtggtaggagagccaactctgatgggaggtgagtttggggacgaggacgaaaggctaatcactagattagaaaacacgcaatatgatgcggccaacggcatggacgacgaggaggacttcaacaattcacccgcgctggggaacaacagcccgtggaacagtaaacctcccgccactcaagagaccaaatcagaaaaccccccaccccaggcttcccaataagatgatcggcaccagaatccactgtcaataggcccgtgggtgatcattacaattgcaaatctttacttacaggagaggaaacagaagagataaaaacttttccatgcaaatatctatttctaaaccacaatgatctgattttctttcttctttctttttttctaattgagaggattattcccaataagcttccatgaccctttcttggaggccttcacaggtaatacagatactggcactgattgtaattaaaatgagagaaaactctagcgcatcttctggcacggttttaacaacgtgtttgtgttgaatttcctttttatgcatcaaacgaaggccatattgtccataaatgctcagtgctcaggatctcattaatatgccgaacctaactacagatgactttttaatattgtaaaatattttctgctttttgacttgcatctgagagtttcttgtttcagtaaaaaaagaaaagacaaaaaaatcagctttggaaagtaatttaaatgtaccttattttttttttctttatgttttctttcattgggcaacagctaagagggcccagcaaggtaatttatggttgagctgatgtcaattggttcttgtcttgagtcgactcaatttagcccaagtgctgaaacaagaaatgtcatttttttcatcaaagacaccagggcagatttttaagtaaagaaagacaattggacccttaagaatttatgcatttgtaaagttgctgttgatccaaatattttcaagccatgtaatccattggttttgtgggcagtttaataaacctgaacctttgtgtgttttctaattgtacctgagttgaccatcctttctttttatagtatattcttgtatgatattttgtaaagctctcacctggtttcttttatgggggacttttcgtttttgggcaactccagtgtatttatgtgaaactttataagagaattaatttttccatttgcatattaatatgttcctccacacatgtaaaggcacagtggctccgtgtgttaaaaaacagctgtattttatgtatgctttactgataagtgtgccaataataaactgtgttaatgacc

SEQ ID NO: 299 - DNA, 4469 bp, Homo sapiens
  Genbank Accession No. AF056087
cctgcagcctccggagtcagtgccgcgcgcccgccgccccgcgccttcctgctcgccgcacctccgggagccggggcgcacccagcccgcagcgccgcctccccgcccgcgccgcctccgaccgcaggccgagggccgccactggccggggggaccgggcagcagcttgcggccgcggagccgggcaacgctggggactgcgccttttgtccccggaggtccctggaagtttgcggcaggacgcgcgcggggaggcggcggaggcagccccgacgtcgcggagaacagggcgcagagccggcatgggcatcgggcgcagcgaggggggccgccgcggggccctgggcgtgctgctggcgctgggcgcggcgcttctggccgtgggctcggccagcgagtacgactacgtgagcttccagtcggacatcggcccgtaccagagcgggcgcttctacaccaagccacctcagtgcgtggacatccccgcggacctgcggctgtgccacaacgtgggctacaagaagatggtgctgcccaacctgctggagcacgagaccatggcggaggtgaagcagcaggccagcagctgggtgcccctgctcaacaagaactgccacgccgggacccaggtcttcctctgctcgctcttcgcgcccgtctgcctggaccggcccatctacccgtgtcgctggctctgcgaggccgtgcgcgactcgtgcgagccggtcatgcagttcttcggcttctactggcccgagatgcttaagtgtgacaagttcccggagggggacgtctgcatcgccatgacgccgcccaatgccaccgaagcctccaagccccaaggcacaacggtgtgtcctccctgtgacaacgagttgaaatctgaggccatcattgaacatctctgtgccagcgagtttgcactgaggatgaaaataaaagaagtgaaaaaagaaaatggcgacaagaagattgtccccaagaagaagaagcccctgaagttggggcccatcaagaagaaggacctgaagaagcttgtgctgtacctgaagaatggggctgactgtccctgccaccagctggacaacctcagccaccacttcctcatcatgggccgcaaggtgaagagccagtacttgctgacggccatccacaagtgggacaagaaaaacaaggagttcaaaaacttcatgaagaaaatgaaaaaccatgagtgccccacctttcagtccgtgtttaagtgattctcccgggggcagggtggggagggagcctcgggtggggtgggagcgggggggacagtgcccgggaacccgtggtcacacacacgcactgccctgtcagtagtggacattgtaatccagtcggcttgttcttgcagcattcccgctccctttccctccatagccacgctccaaaccccagggtagccatggccgggtaaagcaagggccatttagattaggaaggtttttaagatccgcaatgtggagcagcagccactgcacaggaggaggtgacaaaccatttccaacagcaacacagccactaaaacacaaaaagggggattgggcggaaagtgagagccagcagcaaaaactacattttgcaacttgttggtgtggatctattggctgatctatgcctttcaactagaaaattctaatgattggcaagtcacgttgttttcaggtccagagtagtttctttctgtctgctttaaatggaaacagactcataccacacttacaattaaggtcaagcccagaaagtgataagtgcagggaggaaaagtgcaagtccattatctaatagtgacagcaaagggaccaggggagaggcattgccttctctgcccacagtctttccgtgtgattgtctttgaatctgaatcagccagtctcagatgccccaaagtttcggttcctatgagcccggggcatgatctgatccccaagacatgtggaggggcagcctgtgcctgcctttgtgtcagaaaaaggaaaccacagtgagcctgagagagacggcgattttcgggctgagaaggcagtagttttcaaaacacatagttaaaaaagaaacaaatgaaaaaaattttagaacagtccagcaaattgctagtcagggtgaattgtgaaattgggtgaagagcttaggattctaatctcatgttttttccttttcacatttttaaaagaacaatgacaaacacccacttatttttcaaggttttaaaacagtctacattgagcatttgaaaggtgtgctagaacaaggtctcctgatccgtccgaggctgcttcccagaggagcagctctccccaggcatttgccaagggaggcggatttccctggtagtgtagctgtgtggctttccttcctgaagagtccgtggttgccctagaacctaacaccccctagcaaaactcacagagctttccgtttttttctttcctgtaaagaaacatttcctttgaacttgattgcctatggatcaaagaaattcagaacagcctgcctgttcccccgcactttttacatatatttgtttcatttctgcagatggaaagttgacatgggtggggtgtccccatccagcgagagagtttcaaaagcaaaacatctctgcagtttttcccaagtaccctgagatacttcccaaagcccttatgtttaatcagcgatgtatataagccagttcacttagacaactttacccttcttgtccaatgtacaggaagtagttctaaaaaaaatgcatattaatttcttcccccaaagccggattcttaattctctgcaacactttgaggacatttatgattgtccctctgggccaatgcttatacccagtgaggatgctgcagtgaggctgtaaagtggccccctgcggccctagcctgacccggagaaaggatggtagattctgttaactcttgaagactccagtatgaaaatcagcatgcccgcctagttacctaccggagagttatcctgataaattaacctctcacagttagtgatcctgtccttttaacaccttttttgtggggttctctctgacctttcatcgtaaagtgctggggaccttaagtgatttgcctgtaattttggatgattaaaaaatgtgtatatatattagctaattagaaatattctacttctctgttgtcaaactgaaattcagagcaagttcctgagtgcgtggatctgggtcttagttctggttgattcactcaagagttcagtgctcatacgtatctgctcattttgacaaagtgcctcatgcaaccgggccctctctctgcggcagagtccttagtggaggggtttacctggaacataagtagttaccacagaatacggaagagcaggtgactgtgctgtgcagctctctaaatgggaattctcaggtaggaagcaacagcttcagaaagagctcaaaataaattggaaatgtgaatcgcagctgtgggttttaccaccgtctgtctcagagtcccaggaccttgagtgtcattagttactttattgaaggttttagacccatagcagctttgtctctgtcacatcagcaatttcagaaccaaaagggaggctctctgtaggcacagagctgcactatcacgagcctttgtttttctccacaaagtatctaacaaaaccaatgtgcagactgattggcctggtcattggtctccgagagaggaggtttgcctgtgatttgcctgtgatttcctaattatcgctagggccaaggtgggatttgtaaagctttacaataatcattctggatagagtcctgggaggtccttggcagaactcagttaaatctttgaagaatatttgtagttatcttagaagatagcatgggaggtgaggattccaaaaacattttatttttaaaatatcctgtgtaacacttggctcttggtacctgtgggttagcatcaagttctccccagggtagaattcaatcagagctccagtttgcatttggatgtgtaaattacagtaatcccatttcccaaacctaaaatctgtttttctcatcagactctgagtaactggttgctgtgtcataacttcatagatgcaggaggctcaggtgatctgtttgaggagagcaccctaggcagcctgcagggaataacatactggccgttctgacctgttgccagcagatacacaggacatggatgaaattcccgtttcctctagtttcttcctgtagtactcctcttttagatcctaagtctcttacaaaagctttgaatactgtgaaaatgttttacattccatttcatttgtgttgtttttttaactgcattttaccagatgttttgatgttatcgcttatgttaatagtaattcccgtacgtgttcattttattttcatgctttttcagccatgtatcaatattcacttgactaaaatcactcaattaatcaatgaaaaaaaaaaa

SEQ ID NO: 300 - DNA, 325 bp, Homo sapiens
  Genbank Accession No. AF058075
tcctatgagctgacagccaccctcggtgtcagtgtccccaggacagacggccaggatcacctgctctgcagatgcattgccaaagcaatatgcttattggtaccagcagaagccaggccaggcccctgtgctggtgatatataaagacagtgagaggccctcagggatccctgagcgattctctggctccagctcagggacaacagtcacgttgaccatcagtggagtccaggcagaagacgaggctgactattactgtcaatcagcagacagcagtggtacttcccatgtggtattcggcggagggaccaagctgaccgtccta

SEQ ID NO: 301 - DNA, 2042 bp, Homo sapiens
  Genbank Accession No. AF063002
caaccatatatccaagcctttgccgaatacatcctatctgccacacatccagcgtgaggtccctccagctacaaggtgggcaccatggcggagaagtttgactgccactactgcagggatcccttgcaggggaagaagtatgtgcaaaaggatggccaccactgctgcctgaaatgctttgacaagttctgtgccaacacctgtgtggaatgccgcaagcccatcggtgcggactccaaggaggtgcactataagaaccgcttctggcatgacacctgcttccgctgtgccaagtgccttcaccccttggccaatgagacctttgtggccaaggacaacaagatcctgtgcaacaagtgcaccactcgggaggactcccccaagtgcaaggggtgcttcaaggccattgtggcaggagatcaaaacgtggagtacaaggggaccgtctggcacaaagactgcttcacctgtagtaactgcaagcaagtcatcgggactggaagcttcttccctaaaggggaggacttctactgcgtgacttgccatgagaccaagtttgccaagcattgcgtgaagtgcaacaaggccatcacatctggaggaatcacttaccaggatcagccctggcatgccgattgctttgtgtgtgttacctgctctaagaagctggctgggcagcgtttcaccgctgtggaggaccagtattactgcgtggattgctacaagaactttgtggccaagaagtgtgctggatgcaagaaccccatcactgggaaaaggactgtgtcaagagtgagccacccagtctctaaagctaggaagcccccagtgtgccacgggaaacgcttgcctctcaccctgtttcccagcgccaacctccggggcaggcatccgggtggagagaggacttgtccctcgtgggtggtggttctttatagaaaaaatcgaagcttagcagctcctcgaggcccgggtttggtaaaggctccagtgtggtggcctatgaaggacaatcctggcacgactactgcttccactgcaaaaaatgctccgtgaatctggccaacaagcgctttgttttccaccaggagcaagtgtattgtcccgactgtgccaaaaagctgtaaactgacaggggctcctgtcctgtaaaatggcatttgaatctcgttctttgtgtccttctttctgccctataccatcaataggggaagagttccttcccttctttaaagttcctcccttccgtcttttctcccattttacagtattactcaaataagggcacacagtgatcatattagcatttagcaaaaagcaaccctgcagcaaagtgaatttctgtccggctgcaatttaaaaatgaaaacttaggtagattgactcttctgcatgtttctcatagagcagaaaagtgctaatcatttagccacttagtgatgtaagcaagaagcataggagataaaacccccactgagatgctctcatgcctcagctggacccaccgtgtagacacacgacatgcaagagttgcagcggctgctccaactcactgctcaccctctctgtgagcagaaagaaccctactgacatgcatggttaacttcctcatcagaactctgcccttcccttctgttcttttgtgctttcaaataactaacacgaacttccagaaaattaacatttgaacttagctgtaattctaaactgacctttccccgtactaacgtttggtttccccgtgtggcatgcttttctgagccttcctactttaaagcatggaacatgcaggtgatttgggaagtgtagaaagacctgagaaaacgagcctgtttcagaggaacatcgtcacaacgaatacttctggaagcttaacaaaactaaccctgctgtcctttttattgtttttaattaatatttttgttttaattgatagcaaaatagtttatgggtttggaaacttgcatgaaaatattttagccccctcagatgttcctgcagtgctgaaattcatcctacagaagtaaccgcaaaactctagc

SEQ ID NO: 302 - DNA, 652 bp, Homo sapiens
  Genbank Accession No. AF063500
  misc_feature (1)..(652): n = a or c or g or t
gcttttttttttttttttttttaatatagaacagtcaggttttattacttttaagtaataaagagccttttccttgcttttcttttttccctttttttcttttcttttttcttttcttacaacatacattaagtcgtgaatcagatgttaggggatgtggagatggaaggaaaattggtgacatcacaatatttttacaactttacaacaaatataaatctgagtttgttgcatctaccagtgtctagcaagggtggaaagcaaaggcacactcgggtttatggaccctccccccacacacagtggggaaaaaaactgggganaaatacttaaatgcagaagaccagctcaatacatgtgggtattttagggttaacaccaaaagtgatgggttgtgggggtgtaggaatgtggatgtaagttttgacacaggtctccttaacagctgaggcagtgatgcctacaaacactggacaagacagccgcttacgtcaatgatgggtgctgcactgccagtactctcgggantcaagcatgggaaagaanggggcagggggatacagacccatcaccttcctaatttctgcatttctaganaaaatcaaggaanaaaacaatatttcaggttctaagaaatacttccagggtttca

SEQ ID NO: 303 - DNA, 1658 bp, Homo sapiens
  Genbank Accession No. AF067656
ggcacgagctcggctcctggaaagatggaggcagcggagacagaggcggaagctgcagccctagaggtcctggctgaggtggcaggcatcttggaacctgtaggcctgcaggaggaggcagaactgccagccaagatcctggttgagtttgtggtggactctcagaagaaagacaagctgctctgcagccagcttcaggtagcggatttcctgcagaacatcctggctcaggaggacactgctaagggtctcgaccccttggcttctgaagacacgagccgacagaaggcaattgcagctaaggaacaatggaaagagctgaaggccacctacagggagcacgtagaggccatcaaaattggcctcaccaaggccctgactcagatggaggaagcccagaggaaacggacacaactccgggaagcctttgagcagctccaggccaagaaacaaatggccatggagaaacgcagagcagtccagaaccagtggcagctacaacaggagaagcatctgcagcatctggcggaggtttctgcagaggtgagggagcgtaagacagggactcagcaggagcttgacggggtgtttcagaaacttggaaacctgaagcagcaggcagaacaggagcgggacaagctgcagaggtatcagaccttcctccagcttctgtataccctgcagggtaagctgttgttccctgaggctgaggctgaggcagagaatcttccagatgataaaccccagcagccgactcgaccccaggagcagagtacaggagacaccatggggagagaccctggtgtgtccttcaaggctgttggtctacaacctgctggagatgtaaatttgccatgacttcctggaggacagcagcatggagaaagatcctagaaaaggcctctgacttccctcacctcccaaccatcattacaggaaagactgtgaactcctgagttcagcttgatttctgactacatcccagcaagctctggcatctgtggattaaaatccctggatctctctcagttgtgtatttgttcatcttcatatgctggcaggaacaactattaatacagatactcagaagccaataacatgacaggagctgggactggtttgaacacagggtgtgcagatggggagggggtactggccttgggcctcctatgatgcagacatggtgaatttaattcaaggaggaggagaatgttttaggcaggtggttatatgtgggaagataattttattcatggatccaaatgtttgttgagtcctttctttgtgctaaggttcttgcggtgaaccagaattataacagtgagctcatctgactgttttaggatgtacagcctagtgttaacattcttggtatctttttgtgccttatctaaaacatttctcgatcactggtttcagatgttcatttattatattcttttcaaagattcagagattggcttttgtcatccactattgtatgttttgtttcattgacctctagtgataccttgatctttcccactttctgttttcggattggagaagatgtaccttttttgtcaactcttacttttatcagatgatcaactcacgtatttggatctttatttgttttctcaaataaatatttaaggttaaaaaaaaaaaaaaaaaaa

SEQ ID NO: 304 - DNA, 1332 bp, Homo sapiens
  Genbank Accession No. AF070648
atgccttactcttcttgaaattttaacctatgatattttctgtgcctgaatatttgttatgtagataacaagacctcagtgccttcctgtttttcacattttccttttcaaatagggtctaactcagcaactcgctttaggtcagcagcctccctgaagaccaaaattagaatatccatgacctagttttccatgcgtgtttctgactctgagctacagagtctggtgaagctcacttctgggcttcatctggcaacatctttatccgtagtgggtatggttgacactagcccaatgaaatgaattaaagtggaccaatagggctgagctctctgtgggctggcagtcctggaagccagctttccctgcctctcatcaactgaatgaggtcagcatgtctattcagcttcgtttattttcaagaataatcacgctttcctgaatccaaactaatccatcaccggggtggtttagtggctcaacattgtgttcccatttcagctgatcagtgggcctccaaggaggggctgtaaaatggaggccattgtgtgagcctatcagagttgctgcaaacctgacccctgctcagtaaagcacttgcaaccgtctgttatgctgtgacacatggcccctccccctgccaggagctttggacctaatccaagcatctctttgcccagaaagaagatgggggaggaggcagtaataaaaagattgaagtattttgctggaataagttcaaattcttctgaactcaaactgaggaatttcacctgtaaacctgagtcgtacagaaagctgcctggtatatccaaaagctttttattcctcctgctcatattgtgattctgcctttggggacttttcttaaaccttcagttatgatttttttttcatacacttattggaactctgcttgatttttgcctcttccagtcttcctgacactttaattaccaacctgttacctactttgactttttgcatttaaaacagacactggcatggatatagttttacttttaaactgtgtacataactgaaaatgtgctatactgcatactttttaaatgtaaagatatttttatctttatatgaagaaaatcacttaggaaatggctttgtgattcaatctgtaaactgtgtattccaagacatgtctgttctacatagatgcttagtccctcatgcaaatcaattactggtccaaaagattgctgaaattttatatgcttactgatatattttacaattttttatcatgcatgtcctgtaaaggttacaagcctgcacaataaaaatgtttaacggttaaaaaaaaaaaaaaaaaaa

SEQ ID NO: 305 - DNA, 1599 bp, Homo sapiens
  Genbank Accession No. AF082868
ggaccaaagctgacagtttctttacttgcaggtagctgacagcatctactcctgaagaccggaaacatggcttgtaccatccaaaaggcagaagcacttgacggggctcatttgatgcagatcctctggtatgatgaggaagagtctctctacccagctgtatggttgagagacaactgtccgtgctctgattgctacctggattctgcaaaagcacggaaacttctagtggaagctcttgatgtgaacattggaattaaaggcttgatatttgacagaaaaaaggtgtacatcacatggcccgatgagcattacagtgaattccaggctgattggctgaagaaaagatgcttttccaagcaggccagagcaaagctccaaagagaattgttttttccagaatgccaatactggggctcagagctccagctacccactttggattttgaagatgttttaagatatgatgaacatgcatacaagtggctctccaccctcaagaaagtaggcatagtaagactcaccggagcatctgacaaaccaggagaagtttcaaaacttgggaaaaggatgggtttcctctatctcacattttatggacatacttggcaagtgcaagacaaaatcgatgcaaacaatgtggcttacacaactgggaagctaagctttcacactgattatccagccctccatcatccacctggggttcagcttcttcactgcataaagcaaacagtcacagggggtgattcagaaattgtagatgggtttaatgtgtgccaaaaactaaagaaaaataatcctcaggcattccagattttgtcctctacctttgtggactttacagacattggagtggattactgtgatttttctgtacaatcaaaacataaaattatagagttagatgataaaggccaagtggttcgcatcaacttcaataacgcaactagggacacaatatttgatgtacctgttgaaagagttcagcctttttatgctgctctgaaggagtttgttgacctcatgaacagcaaagaatccaagtttaccttcaagatgaatccaggtgatgtgattacttttgataactggcgcttacttcatggccgacgtagctatgaagcaggaactgagatatcccgccatctagaaggagcttatgctgactgggatgtggtcatgtcaaggcttcgtatcttaaggcagagggtggagaatggaaactgaagtcacctgtagataattttaataagattccaatgaccatattttgtgagatatggcacattattcacagaccatgatctttgtgatttacatataatttccttaacaatgaacatgtaacttctctcacaagagtactctttactttgtaatcatatacaatgtcaactttttagatgtttcaccactcttttgcaaataaagcatcctttctgctctgttgcatgcctgctctaatttcttttgcccatatatgagtatctccagaatgtctacaaatagtttttgtagcaaatgaaaatttcttcaaataagccttttgtttcaaataaaacttgtctcaaaacatgcttcaaaaaaaaaaaaaaa

SEQ ID NO: 306 - DNA, 2019 bp, Homo sapiens
  Genbank Accession No. AF093118
  misc_feature (1)..(2019): n = a or c or g or t
accccggcgctctccccgtgtnctctccacgactcgctcggcccctctggaataaaacacccgcgagccccgagggcccagaggaggccgacgtgcccgagctcctccgggggtcccgcccgcaagctttcttctcgccttcgcatctcctcctcgcgcgtcttggacatgccaggaataaaaaggatactcactgttaccattctggctctctgtcttccaagccctgggaatgcacaggcacagtgcacgaatggctttgacctggatcgccagtcaggacagtgtttagatattgatgaatgccgaaccatccccgaggcctgccgaggagacatgatgtgtgttaaccaaaatggggggtatttatgccattcccggacaaaccctgtgtatcgagggccctactcgaacccctactcgaccccctactcaggtccgtacccagcagctgccccaccactctcagctccaaactatcccacgatctccaggcctcttatatgccgctttggataccagatggatgaaagcaaccaatgtgtggatgtggacgagtgtgcaacagattcccaccagtgcaaccccacccagatttgcatcaatatgaagggcgggtacacctgctcctgcaccgacggatattggcttttggaaggccagtgcttagacattgatgaatgtcgctatggttactgccagcagctctgtgcgaatgttcctggatcctattcttgtacatgcaaccctggttttaccctcaatgaggatggaaggtcttgccaagatgtgaacgagtgtgccaccgagaacccctgcgtgcaaacctgcgtcaacacctacggctctttcatctgccgctgtgacccaggatatgaacttgaggaagatggcgttcattgcagtgatatggacgagtgcagcttctctgagttcctctgccaacatgagtgtgtgaaccagcccggcacatacttctgctcctgccctccaggctacatcctgctggatgacaaccgaagctgccaagacatcaacgaatgtgagcacaggaaccacacgtgcaacctgcagcagacgtgctacaatttacaagggggcttcaaatgcatcgaccccatccgctgtgaggagccttatctgaggatcagtgataaccgctgtatgtgtcctgctgagaaccctggctgcagagaccagccctttaccatcttgtaccgggacatggacgtggtgtcaggacgctccgttcccgctgacatcttccaaatgcaagccacgacccgctaccctggggcctattacattttccagatcaaatctgggaatgagggcagagaattttacatgcggcaaacgggccccatcagtgccaccctggtgatgacacgccccatcaaagggccccgggaaatccagctggacttggaaatgatcactgtcaacactgtcatcaacttcagaggcagctccgtgatccgactgcggatatatgtgtcgcagtacccattctgagcctcgggctggagcctccgacgctgcctctcattggcaccaagggacaggagaagagaggaaataacagagagaatgagagcgacacagacgttaggcatttcctgctgaacgtttccccgaagagtcagccccgacttcctgactctcacctgtactattgcagacctgtcaccctgcaggacttgccacccccagttcctatgacacagttatcaaaaagtattatcattgctcccctgatagaagattgttggtgaattttcaaggccttcagtttatttccactattttcaaagaaaatagattaggtttgcgggggtctgagtctatgttcaaagactgtgaacagcttgctgtcacttcttcacctcttccactccttctctcactgtgttactgctttgcaaagacccggggagctggcggggaaaccctggggagtagctagtttgctttttgcgtacacagaagaaggctatgtaaacaaaccacagcaggatc

SEQ ID NO: 307 - DNA, 2302 bp, Homo sapiens
  Genbank Accession No. AF095448
ccaaggtctcccccagcactgaggagctcgcctgctgccctcttgcgcgcgggaagcagcaccaagttcacggccaacgccttggcactagggtccagaatggctacaacagtccctgatggttgccgcaatggcctgaaatccaagtactacagactttgtgataaggctgaagcttggggcatcgtcctagaaacggtggccacagccggggttgtgacctcggtggccttcatgctcactctcccgatcctcgtctgcaaggtgcaggactccaacaggcgaaaaatgctgcctactcagtttctcttcctcctgggtgtgttgggcatctttggcctcaccttcgccttcatcatcggactggacgggagcacagggcccacacgcttcttcctctttgggatcctcttttccatctgcttctcctgcctgctggctcatgctgtcagtctgaccaagctcgtccgggggaggaagcccctttccctgttggtgattctgggtctggccgtgggcttcagcctagtccaggatgttatcgctattgaatatattgtcctgaccatgaataggaccaacgtcaatgtcttttctgagctttccgctcctcgtcgcaatgaagactttgtcctcctgctcacctacgtcctcttcttgatggcgctgaccttcctcatgtcctccttcaccttctgtggttccttcacgggctggaagagacatggggcccacatctacctcacgatgctcctctccattgccatctgggtggcctggatcaccctgctcatgcttcctgactttgaccgcaggtgggatgacaccatcctcagctccgccttggctgccaatggctgggtgttcctgttggcttatgttagtcccgagttttggctgctcacaaagcaacgaaaccccatggattatcctgttgaggatgctttctgtaaacctcaactcgtgaagaagagctatggtgtggagaacagagcctactctcaagaggaaatcactcaaggttttgaagagacaggggacacgctctatgccccctattccacacattttcagctgcagaaccagcctccccaaaaggaattctccatcccacgggcccacgcttggccgagcccttacaaagactatgaagtaaagaaagagggcagctaactctgtcctgaagagtgggacaaatgcagccgggcggcagatctagcgggagctcaaagggatgtgggcgaaatcttgagtcttctgagaaaactgtacaagacactacgggaacagtttgcctccctcccagcctcaaccacaattcttccatgctggggctgatgtgggctagtaagactccagttcttagaggcgctgtagtatttttttttttttgtctcatcctttggatacttcttttaagtgggagtctcaggcaactcaagtttagacccttactctttttgtttgttttttgaaacaggatcttgctctgtcacccaggcttgagtgcagtggtgcgatcacagcccagtgcagcctcgaccacctgtgctcaagcaatcctcccatctccatctcccaaagtgctgggatgacaggcgtgagccacagctcccagcctaggcccttaatcttgctgttattttccatggactaaaggtctggtcatctgagctcacgctggctcacacagctctaggggcctgctcctctaactcacagtgggttttgtgaggctctgtggcccagagcagacctgcatatctgagcaaaaatagcaaaagcctctctcagcccactggcctgaatctacactggaagccaacttgctggcacccccgctccccaacccttcttgcctgggtaggagaggctaaagatcaccctaaatttactcatctctctagtgctgcctcacattgggcctcagcagctccccagcaccaattcacaggtcacccctctcttcttgcactgtccccaaacttgctgtcaattccgagatctaatctccccctacgctctgccaggaattctttcagacctcactagcacaagcccggttgctccttgtcaggagaatttgtagatcattctcacttcaaattcctggggctgatacttctctcatcttgcaccccaacctctgtaaatagatttaccgcatttacggctgcattctgtaagtgggcatggtctcctaatggaggagtgttcattgtataataagttattcacctgagtatgcaataaagatgtggtggccactctttcatggtggtggcagcaaaaaaaaaaaaaa

SEQ ID NO: 308 - DNA, 2380 bp, Homo sapiens
  Genbank Accession No. AF098462
gaggaggagggaaaaggcgagcaaaaaggaagagtgggaggaggaggggaagcggcgaaggaggaagaggaggaggaggaagaggggagcacaaaggatccaggtctcccgacgggaggttaataccaagaaccatgtgtgccgagcggctgggccagttcatgaccctggctttggtgttggccacctttgacccggcgcgggggaccgacgccaccaacccacccgagggtccccaagacaggagctcccagcagaaaggccgcctgtccctgcagaatacagcggagatccagcactgtttggtcaacgctggcgatgtggggtgtggcgtgtttgaatgtttcgagaacaactcttgtgagattcggggcttacatgggatttgcatgacttttctgcacaacgctggaaaatttgatgcccagggcaagtcattcatcaaagacgccttgaaatgtaaggcccacgctctgcggcacaggttcggctgcataagccggaagtgcccggccatcagggaaatggtgtcccagttgcagcgggaatgctacctcaagcacgacctgtgcgcggctgcccaggagaacacccgggtgatagtggagatgatccatttcaaggacttgctgctgcacgaaccctacgtggacctcgtgaacttgctgctgacctgtggggaggaggtgaaggaggccatcacccacagcgtgcaggttcagtgtgagcagaactggggaagcctgtgctccatcttgagcttctgcacctcggccatccagaagcctcccacggcgccccccgagcgccagccccaggtggacagaaccaagctctccagggcccaccacggggaagcaggacatcacctcccagagcccagcagtagggagactggccgaggtgccaagggtgagcgaggtagcaagagccacccaaacgcccatgcccgaggcagagtcgggggccttggggctcagggaccttccggaagcagcgagtgggaagacgaacagtctgagtattctgatatccggaggtgaaatgaaaggcctggccacgaaatctttcctccacgccgtccattttcttatctatggacattccaaaacatttaccattagagaggggggatgtcacacgcaggattctgtggggactgtggacttcatcgaggtgtgtgttcgcggaacggacaggtgagatggagacccctggggccgtggggtctcaggggtgcctggtgaattctgcacttacacgtactcaagggagcgcgcccgcgttatcctcgtacctttgtcttctttccatctgtggagtcagtgggtgtcggccgctctgttgtgggggaggtgaaccagggaggggcagggcaaggcagggcccccagagctgggccacacagtgggtgctgggcctcgccccgaagcttctggtgcagcagcctctggtgctgtctccgcggaagtcagggcggctggattccaggacaggagtgaatgtaaaaataaatatcgcttagaatgcaggagaagggtggagaggaggcaggggccgagggggtgcttggtgccaaactgaaattcagtttcttgtgtggggccttgcggttcagagctcttggcgagggtggagggaggagtgtcatttctatgtgtaatttctgagccattgtactgtctgggctgggggggacactgtccaagggagtggcccctatgagtttatattttaaccactgcttcaaatctcgatttcactttttttatttatccagttatatctacatatctgtcatctaaataaatggctttcaaacaaagcaactgggtcattaaaaccagctcaaagggggtttaaaaaaaaaaaaaccagcccatcctttgaggctgatttttcttttttttaagttctattttaaaagctatcaaacagcgacatagccatacatctgactgcctgacatggactcctgcccacttgggggaaaccttatacccagaggaaaatacacacctggggagtacatttgacaaatttcccttaggatttcgttatctcaccttgaccctcagccaagattggtaaagctgcgtcctggcgattccaggagacccagctggaaacctggcttctccatgtgaggggatgggaaaggaaagaagagaatgaagactacttagtaattcccatcaggaaatgctgaccttttacataaaatcaaggagactgctgaaaatctctaagggacaggattttccagatcctaattggaaatttagcaataaggagaggagtccaaggggacaaataaaggcagagagagagagagagagagggagaggaagaaaagagagagagaaaagagcctcgtgcc

SEQ ID NO: 309 - DNA, 1190 bp, Homo sapiens
  Genbank Accession No. AF150174
gggggtggaggtcagcagtgccacagaacaaactggagttaagaaatgtcgttcttcagatttaaaaagaaaacctttactgaatcagctgagtgttaataatacgaatttccttttcttgccaattctgatctgaacagaaaatccaagaacagggatatgtgtggattacagttttctctgccttgcctacgactgtttctgccttgcatccaagggtccttaagccgttgtcttcattgattcatcttcaggcaaattctaatccttgggaatgtaactgcaaacttttgggccttcgagactggctagcatcttcagccattactctaaacatctattgtcagaatcccccatccatgcgtggcagagcattacgttatattaacattacaaattgtgttacatcttcaataaatgtatccagagctagggctgtgtaaaatctcctcatattcatcacaagactactgcgctaatgatggcctggcataaagtaaccacaaatggcagtcctctggaaaatactgagactgagaacattactttctgggaacgaattcctacttcacctgctggtagattttttcaagagaatgcctttggtaatccattagagactacagcagtgttacctgtgcaaatacaacttactacttctgttaccttgaacttggaaaaaaacagtgctctaccgaatgatgctgcttcaatgtcagggaaaacatctctaatttgtacacaagagttgagaagttgaatgaggcttttgacattttgctagctttttcatcttagcttgtgttttaatcattttttgatctacaaagttgttcagtttaaacaaaaactaaaggcatcagaaaactcaagggaaaatagactttgaatactaccagcttttatcagtcagcaaggtataatgtaactgcctcaatttgtaacacttccccaaattctctagaaagtcctggcttggagcagattcgacttcataaacaaatgttcctgaaaatgaggcacaggtcttctttttgaacattctgctttataactcaactaaatattgtctataagaaacttcatgccatggacatgatttaaactgaaacctccttatataattatatactttagttggaaatataatgaattatatgaggttagcattattaaaatatgtttttagt

SEQ ID NO: 310 - DNA, 714 bp, Homo sapiens
  Genbank Accession No. AF154332
actagtgattaatttaaatataattctgtaaatgtgtgtaggtctcactgtaacaactatttgttactataataaaactataatattgatgtcaggaatcaggaaaaaatttgagttggcttaaatcatctcagtccttatggcagttttattttcctgtagttggaactactaaaatttaggaaaatgctaagttcaagtttcgtaatgctttgaagtatttttatgctctgaatgtttaaatgttctcatcagtttcttgccatgttgttaactatacaacctggctaaagatgaatatttttctactggtattttaatttttgacctaaatgttcaagcattcggaatgagaaaactatacagatttgagaaatgatgctaaatttatagttttcagtaacttaaaaagctaacatgagagcatgccaaaatttgctaagtcttacaaagatcaagggctgtccgcaacagggaagaacagttttgaaaatttatgaactatcttatttttaggtaggttatgaaagctttttgtctaagtgaattcttatgccttggtcagagtaataactgaagcaggtgcttatcttggctttcgagtctgagtttaaaactacacattttgacatagtgtttattagcagccatctaaaaaggctctaaggtatatttaactaaaatactagctttgggaatcaaactgtttaacaa

SEQ ID NO: 311 - DNA, 605 bp, Homo sapiens
  Genbank Accession No. AI002238
  misc_feature (1)..(605): n = a or c or g or t
ttttttttttttttctaacaaaaaccacttttatttttaaatcaatttactatcaaatacacaacagaactcggtgtggaggcagtgtttgatttcaactggttatctgttaaaaggcttgtgtcccagtgcaacactacctttgtgcagaaaatgttcactgaaaataaatatcctaagaatggataatcttcactgtagcatcttgtcagtggcactacttttaaaaaaatgattccctttagaaaagctagtatatttgtattcagagattacaagtgagggaacacactgtgaatattaggtttaccatatgtgaaatttgtttttgacttacaaaaatgcccatatcacatggttcaccttttatctactaaagtttaaaacaaatgtcatttgtgttgactttgttttttaagatgcagtgattaggaccattatagacntcttttcncactatagacaaatctttttgataagccttaaaaggtcttctacaactgtaaacaatgctgtttctatatgcattcagttttaggtaagaacaaacaacccgtgcgaatcctgctcgggccaattccatagggcggataattggagcagca

SEQ ID NO: 312 - DNA, 495 bp, Homo sapiens
  Genbank Accession No. AI015982
ttttttttttttttaacagaaaaaaatatatatatttcaaaggtaactagttttgttttactcaaactatttacaacaaggggcagagtagagacatgaatagctgcacaagttattttaattataaattaataaaagcctacattaaattcatcttattaactacttatgagagtgtataaaaactgatgaagccaacattatttggtacttctgatacttccattcgcttcaacttttctttctaaatagaaaattaaaagatggcaagccatttacaaaaagacatgtaattttgttaatcaggttgacattttgaacatcttcctcttcagttcagctgtcttctcatctatcttagcataggagtcctctgctgccttttcaataccgtcgtggtatttctccaaagcagttttcaagtttagaaatatttcctgggacttcagtttctccctttcagcagcatcttttagttgttgaattccaagttta

SEQ ID NO: 313 - DNA, 561 bp, Homo sapiens
  Genbank Accession No. AI016073
  misc_feature (1)..(561): n = a or c or g or t
tttttttttgcaatttgaactacatttatttttcaacaagtgggggcaatatgaagtgttttgaatgttgtgtgcaaaacgaatccatctcaccgtctcactgtcatgatttaacacagcaaggtagatacactggtttccagcattacaggcaacactagatgtactttttttaatgaataatgtaaacttgagttttaaggcagcgggtactaatgctgcacacagacttagctcggtgcccatttcagaaacgggtcagtcagcactcgaaacaagaaactgtgaggggagaaaaggggagccaccagtgtcatctgacaaaaacgatccgtcaaagtgttttccctttcacacgcacaaaatgaaatatttgaacatttagaaaaacaaagcacccatcccaccaacttcggcctgttctttaacaaatatttcaaaatactggtaaataatagtgactgctagcagaattccagngccagatccaatggctcccaggaagtcagccagcactgacagggcgccaatgcacaaaccgtcaacgcagctgctgggggg

SEQ ID NO: 314 - DNA, 489 bp, Homo sapiens
  Genbank Accession No. AI016604
tttttgaaatccagcatgagaaatacagtacctgctatggcaaaaaatacacataaaatgcaacttttcagcttatttgtacattagtagagtttaacattttattgtttgtttttttaagtgaaccagtgattttaagtaccactatactaaaaaggaaaataaaatatagaaaagggggcccagcctgccatgcaagtgcacctctaaagtgcctagtttctgtgtccatgtaaaaccagtaatatgaggagcaatttcaacatatgggagtttgattaaacctctatgctaaaaaaaaaaaaaaaaaaaagacaatgccacatcctcccttttctcccccaggggtccttaaatcccattatctacttcctctattgcccatcaaagagagaaaagaaagccaccaaaataatatcgtaaaagcaacttcaagtataagaaaaaaaaaacacttaaaggtaacttgcagagagcatcaatatgtgc

SEQ ID NO: 315 - DNA, 477 bp, Homo sapiens
  Genbank Accession No. AI016755
tttttttctgatctcacatgtttggttattattgtgtaccagttgtacaagaaaattgattttaggtggtatatgggtttatcattctgaagtacaatcacctctgtatcttcctttaaaattgccaaaattgtgctgttactccagccaaaccctggggttttgggtaaagtcattcaccgtgattaaaccatcaggaccaattacttcctgttcaatgtagtttagcatcctgctgacatgtgatgcacagatctccccatccacttcggcaatatacgtgtagagaaactggaaggtgctgaatgggattcggggcaacccaccattgtggtcacatgataagacctcacacactatcttgagagttttggtaatagtaactcccagagcgctgcaagcaagggctaaaaacttcagccactcgatctcctccgtgaagcgacccacattcatcacactattaaacagatctgt

SEQ ID NO: 316 - DNA, 448 bp, Homo sapiens
  Genbank Accession No. AI018237
ttaatttataaagaaaaggagtttatttcttactgttatggaggaatacaaggtcgagggggcacatctggtgggggcacagccttcttgaaggtggggactctacagagacctgaggcggcacatggcatcatgtgacaagggggctgggtgtgctagctcaggtctctcttcctcttataaagccaccagtcctgctctcataataacccattaatctattagtccacacgtggattaatcaattcatgagggcagaggccttaggatccaatcacctcttaaaggccccatctttcaatactgctaagttgggcattcagtttccaacacatgaaatacggggaacacattcaaaccacagcaggtgcagacccttgtaagaacatgggctcctccatcagggctctggcagtcagtgacagctgggttaggactagggtgaagc

SEQ ID NO: 317 - DNA, 533 bp, Homo sapiens
  Genbank Accession No. AI018523
aattatcaaactttattggctggtgaaaaatgattgaattcagcaagtacatttatgatctatctacattgttaaaacagcactaaaaataaaattttttaaaatgattatccattatttacagaaaatgtggaaaagatggcttttaaacccagaacattataggaaaaaaaaaaaaaaaaacagggcatgagaatgattcacaggctgcctctggattacagcaaatggttgaacatgaagtgtgtgaaactcaaggatttgcgtttcttaggaatctcttgttactttgtatgtgtttatactcaattcataaatggactgtcttacaataaaggtgataaaaaatctctgttcctttctttttgcttttcacactttttttccccataaaaacccactgcagtcatagtcagtagttaggggtgggggttggttcaacacattctgggtgctcactcatgaacatgccaaagctatactgcaacactagcctgaattcaacttagagttacctcaccatcaaaatcagg

SEQ ID NO: 318 - DNA, 566 bp, Homo sapiens
  Genbank Accession No. AI023295
  misc_feature (1)..(566): n = a or c or g or t
taaagagatggggtctcactatgttgcctaggctgcagtgaagtggctgttcacaggtgcaataatcacactctaaagcctcaaactcctggactcaaataatactcctgccttatcagaatgtaagctcatcataactcaagaagcatctgtacttaagattaaaaaggtagaaataaaaaaaacaaaaaataggaactaagcagtcataagaaaaaaaaaaaatgggcaggctgccaatccaggaccaaggggtaaggccgtgtcaatgcacctagagaacggaatatcaagccacagagaactattttcaagtctcagaactgaatggaatttgtcctgcagacttacaaacctgctttaaaccccttttctccttccaatttatctcttttggaatgggaatgcttcttcacctgtcccaccattgcatctcagaaacagataacttgttttctatgtatcacagctntagaaatagaagtattattattttttttaacagtctcactcttgccaccaggctgagtgcaatggcacatctcggctactgcacctctgcctcc

SEQ ID NO: 319 - DNA, 427 bp, Homo sapiens
  Genbank Accession No. AI025199
tttaaataatgatgttaactcaccagatccttctgaaagagtcattttattactttcaatgaagtcaagcagagaacaagttgtaatatgaaacacaatttatgcaactatgttgaaattctctgacagagttacatgttctaatgtaagaattttatggtaaaacaaataatatcaagaattaggttaggctcatttttgttttaggttgtcacaggaaaactctttctatacaaaccattaaaattctaaggcaaatgataatgccttaatttttttttaatcatgttccctacagtttaaaattaaacagctgaaactaaacctcatttgaaattatactgttaggcaactccagaagctaaacacaaaaacatgttaaaataaagattgcaacatcaagagaaaaccatcctcatatatatag

SEQ ID NO: 320 - DNA, 721 bp, Homo sapiens
  Genbank Accession No. AI031557
  misc_feature (1)..(721): n = a or c or g or t
ggtgtgcgcgctgcgcccgcgagctcccgggctcggcaaccgtggcatgcttaggattggccatatttaaaagttctgaagtagaacctgcgcctcctctctgcttctccctcctcctcagtaatttatttcgagcttccaggcaagggccacggaagaagggaaagcaagaaactagatgcctgtgtggtaactcctcgcggagctaaggtggactctcttgcagccaacttcccatcagatcaccttgctggacttgcagaccggaatggggctcgcctaaggagccgagcgctgcggaggctgctgcgtgttggatgggagtgggagggggctggagcgagatttccagggcgcagtcctccggggcgttacgccgggcataatggaattgcagaggacgtctagtatctccgggccgctgtcgccggcgtacacggngcangtgccttacaactacaaccagctggaaggcagattcaagcagctgcaagatgagcgtgaagccgtgcagaagaagaccttcaccaagtgggtcaattcccaccttgcccgtgtgtcctgccggatcacagacctgtacactgaccttcgagatggacggatgctcatcaagctgctggaggtcctctctggagagaggctggctaaacccaccaagggacgaatgcgcatccactgcttaaagaatgttgacaaggcccttcagttcctgaaagga

SEQ ID NO: 321 - DNA, 454 bp, Homo sapiens
  Genbank Accession No. AI031771
tttttttcagcctggggaatgggaaactttatctctagtaacaaggaaaccattttaccggaatttttattaacatggaaaagttctgtcaattaatcagacttcactgtccatatcactttcaaccttttgggaaggtagaaagatggaattctgaaactaaagttggtaaagttcacagacatcgtcaaacttgcatggtctaaggtatttcttctttctgtggttcatgagttagtaacagctaaaccaagtgtctaggaatattagctctgattctagaaatctacacttatttaactaaatgctgtaaggactcaggaaatccattctttcaacaaaagttactgaagactttccccattagtatcctaaacaatgtctgcaaaattggttttcatacctggataccttgtcttctaagagacacggcagggaaagatcataggaaaaa

SEQ ID NO: 322 - DNA, 437 bp, Homo sapiens
  Genbank Accession No. AI032972
gttccccctctgttcctcacaataagtttctaatattttctgatgtgcgaatggccgtttgcccagggtatgcttagtgttctccacacatctgtgggcttctcactaattcttgggagtaaggtccagagagagagagggaagacactgtgtcagcagtactggggtggggaggtccgtcccactgtctgtcaaaagcacccagaacaccgagagagttctgagtttggccaatcagctgagaatcaggcaggcttcactctagtactgcctaggaccttctcacctttttcttggatgagctgaatctcttgggggaaaactctaaactggagaagaatctgattgggagtactctgataaggatccaattaaaaagaaaacatggaaacatgccatcatttttgtttatttgttgattgtaaatccattttccc

SEQ ID NO: 323 - DNA, 654 bp, Homo sapiens
  Genbank Accession No. AI037879
  misc_feature (1)..(654): n = a or c or g or t
ttttttttttcaggatttggtatgttttattagagcaaatttttaacaaaaggtggctttcatttacagaatttaatgtgtgtggggactgtccaacccatgtggactcaagtaaggataaccattaagcttgctaatgtattttcttattttcagtttacatacaaattttttttgtttgcttcacattcataaaaaccccaatactgtaaatgacaaataacccctcccatcccttaattaaatatacaaacagcctgaaaacatacaatttaaattggtttaatcttgaagtgtaatccaataagactgaaaactaaacatttcaagtcttgtaccaaatagtaaaatactcgaaggccttcaggatcctttgactgatttacatcaataagagaacctatttttgatgtggtaaaagatatgtgctcatctccaattacaatttcaagctcctgtcggccaaccctatcagggggaggccacaaagcatcatcttcttttgtaatttcactgtcatcaataattctcttcagttcttccattacactcttgtgcacataagcctcttttctgatcatcacatnatttttgtaattgctgtttgtgcatatctaaactttccgtcgggcgaaaatcgaactccagaacttc

SEQ ID NO: 324 - DNA, 483 bp, Homo sapiens
  Genbank Accession No. AI039005
ttttttacaattgcaaagattttatttagggggtttctgtgcttggcacttagaaacagagttccgtgcataagggcaaatttttgtacaccttttcttcatacatattttacatacccttttattgccccctttttcatattcataatattggattccccactaggcacataaatacatttatctacaacacctcaaaaccagaaactttaataatatctgtattattttacttggtattatttgcatttccacaccatttaaaaattttagcttgcaccaagcttcacttgctttcttaccattaaaagatttgaagggaaagggaaagatgaaggacaaaacccaaaacttcaaaatgcaatgtactatttgataaaaatggagatctaagggcaggtagaagggtatagaagacccatctgcaattccctgggacatgaggggatatttcctgccacagggatagcgggcaggcattct

SEQ ID NO: 325 - DNA, 488 bp, Homo sapiens
  Genbank Accession No. AI039722
  misc_feature (1)..(488): n = a or c or g or t
tttaaatactgatcaattttatccacatcatttaacggaatcccagagcagagctcaggaacacatacagaaatagaagaatatccagtacacaaaaagtctggcatcaaataaaattaagcaagaatgcagaaaataaaattttctgcattttggcatcaaataaatgtctggcatcaaatgatgtctggcgtcaaataaaattaagcaagaatgcagaaaagtagaaaattgtggttcataagtagaataatcaaccaatcaaaccaacccataactgacattatgttaaaatagttattggaacaatttaaatgtatcaaagacatttaaaaagataagtagaggcgtggaagatatgaaaacatccaaatcaaacttctggtgattaaaaccacaatgtctggcatgaaaaatacactagatgaaattaatagtagattagatattgccanagaaaaggttaatgaacctgatgacacattaat

SEQ ID NO: 326 - DNA, 405 bp, Homo sapiens
  Genbank Accession No. AI049549
ttttttttgagacagaatctcatctgtcactgaggctggagtgcagtggcacaatcttgcctcactgcagcttcaaactcttggggtcaagtgatcctcccacctcagcctcttgagtagccaggagtacaggcgtgcaccaccacacccggctaatttttgtattttttgtagagacagggtctcaccacattgccccagttggtcttgaactcctgagctcaggcgatttgcccgcctctgcctcccaaagtgctgggagcacaggcaggaatcactgcatccggcctacctgaaatttggtgtctagagaacactaagaggcactgtggctttcagagaaaatacgagaagcagtgctttgcaaactgaccaccatggacagtcatacttgcagtctcacat

SEQ ID NO: 327 - DNA, 740 bp, Homo sapiens
  Genbank Accession No. AI049973
tactttttaaaacatttatatttatatatataaaaaaattaaatatatataatatatagtgtgtttgagactaaaaatatagtacataatatttttaaaaaaaggaaaaaaaagtagaataggaaaaggtgtgagggacacacagatacacattgctaaaaacctacaatggtttgtcctaacaaaaataatatctttttttctcttctcttaattatcatcatggatccatttatttttggggtctgggtggagaaaattcaacaggagctagaaatggaggttgcaatgccaagaatggctgggtagaaaatgtgaccacagggagccctgggcctcttctggtgaaattggacttctcaaaattttctgggtcactgttgctaacaagattgtgtggagttttactgtattgggattttggctgctctttccccagagttagggtattctcaggggggacagcatctgaagagctccaaaagcaaacagaagagctcagggcccatcgatactcaacaaggccagtggttggggccagcaaaaaaccagggtagggacagcagactggcaggaatgagtgacagttctatgcaaatggagttattattattattggtattattaataagggcaggtttgtaccagaactgcccagtatgggctgtgacttctgcgcagcaaatatttctccagggaccgggcctgaagctacctcacagtgatgccaaaaaaatgga

SEQ ID NO: 328 - DNA, 537 bp, Homo sapiens
  Genbank Accession No. AI052524
tttttttttttttttttttttgaattctttgcatattttatttttctttttttgatttccaactcacacacatttggcatattttacatctttgcaataaaacatggttacaatagcttaaggaatttatatatccaaaatatttcaccatgatctcaagatgaaatgaacttgtcttccaaatgttaagtatcctcccaattctaagctacaaactcaagatattgcttacagcctggggatgaataacttaatcattacgctgattccccataatttcagaatttcataaatacaaacaacagtgaagaaggaattcagtgctaaaacttactagtacaaggtggataaccaaataagtaatcacatcaataaataatgatatgtttctggtgcaaagtgccaatacaaagaacccattatcttgttttatctttttaaataaatgactgcgagtgagtgtaaattctgagaaaattacattcctgtaacatgcctcatagccctaccgacacaatatgtacatctatgacgata

SEQ ID NO: 329 - DNA, 337 bp, Homo sapiens
  Genbank Accession No. AI053741
cttttttttttttttttttttgagctcaaagagagttctcattttccctattcaaactaatacccatgccgtgttttttaccttggatttaaagtcaccttaggttggggcaacagattctcactcatgtttaagatcttgttatttcagcttcataagatcaaagaggagtctttcccttttctcttttaccctcaggattctcatcccttacagctgactcttccaggcaatttccatagatctgcagtcctgcctctgccacagtctctctgttgtccccacatctacccaacttcctgtactgttgcccttctgtcgtcttctcgcagccgta

SEQ ID NO: 330 - DNA, 449 bp, Homo sapiens
  Genbank Accession No. AI056241
tttttttttttcttttttcccctgcaggacctctcggcctctctaatgtgctaatatgcattgtgaaattccatttcctttatttatttggccatggagatcgaggccatggtgtcctttttcacaaggtaatgtgtggaatcagtgagccttagagaaagactttttaggaagcacttattccgctcctccaccaaaatgtatatttggggacagttctgtggacttgaagcttcatgttgtcaaagaagtagtttgaatgcaatagcactacctccagagccctccacagatcgtcttggcaaaaatggcaagtgcagatgcaagcttctgttctgaaaggaacacagaatgaatgaggctttcaaagccccttccttcccaaagttacccacagtttaattgagaaatttcactcctctcttcttcttccctcttggtcgtgctga

SEQ ID NO: 331 - DNA, 379 bp, Homo sapiens
  Genbank Accession No. AI057450
actgaaaaagactttaatgtgactttaacagcccagaggctgttcccgtggcagctgctggcaggccctcctcccaggccactccaagcctgaatttcaataaatacagtgcaagtaagtctggtcactaagctggggataccaagacctggggcaccagagagggcatgttgtattgtctgtgaacacacacgtgtgcactgtccaacatacatacctaggatcatgtgcatgcacacagcccccctcagatagcctcacgtcacacacccctcacatccatgcaggcgcacacatatgcgcacacacacatgcacacaccttttattccagcacataggaaactgagcatacaccccttccttacagacacgcaaga

SEQ ID NO: 332 - DNA, 599 bp, Homo sapiens
  Genbank Accession No. AI057637
  misc_feature (1)..(599): n = a or c or g or t
ttttttccttcaaaaaatagtttattctgcacatttcctagtaggctctctgcccaccgttccagggtagcagctactcataacttgtctttctctccaaaaccaagagggccttcccaacagaaaaaccttcagttcccaaagcagcatcgattcttcccctcaccccagcaaacctcggggtggaataatgaatcattcaccttctcccacccctcactgccccgccccaccttcatttgccaggactgtcactggctgatggtcagattttgtctttttcaacttggataccctcaagcatcccagcttttggaggcttccctgggcaacctcatgggcttccacattgaccaggcattacattcagcatccttggacaaaccacccatcagagcagtgggttgtggccagntccctccacccccgactccgccccaatggaagaaaccagaggatcacagggccccaggctgtgccgcctgcagagccaggagctgctgggtgcattgcaacgttctccctgagcaaatcggcatggtcaccacagtccagtcctcagtcaccgacagctctgcccctcggggtcagatcccacc

SEQ ID NO: 333 - DNA, 459 bp, Homo sapiens
  Genbank Accession No. AI073394
ttttctcacagaaaagcatttaatagggacatacgaatagaagccacatttgtgtcttaggtgggggcaagacaagatggtggatccccacactattagcccccagacccagagcttatattctgtagggaaagggcgactccgatgcgatgtgttgaacattgaaggatgataacacagaggctggtttgatttatggttaagtacgtgcacaagaaacagtagataaagtggaaatctcagtggccttcctggatcattcaaggccccgagtcttggactgtgaagcatctgccatggggaagtgctgtttgatatcctttctcaccaggagcattcaagctctggattgggcagcagatgtgcccccagtcccgcaggctgtgttccaggggccctgatttcctcggatgtgctattggccccaggactgaagctgcctcccttcaccctgagact

SEQ ID NO: 334 - DNA, 481 bp, Homo sapiens
  Genbank Accession No. AI073544
ttttggggttgtattttttatttggggaaaatacaacatgtttctgaagttctgtttggttcttgtaggctggttggtttcaggtacctgagacaatagcaccaaattcaacagagagaaagaatgagtgagagagcactttacaccaaggctctgcacataattggtgcaatttgaaattgaatggctcagaagactgctctgtgaggagcagattggagaggataaaccactcatcttgaaaagttcataggaatgtctcaaacatatgaactgttctttccatctcctctacaagttgtgatttgtcataatctttacgatgacggtagatacactgactaagaagagaatataatctctcaagctgatcaactgccagattgttgcttttatccaccaacaaatcaagcaatttcttcaatctctcacgatcaactataagaggaggcacaggctcagatggctcttctggaaccag

SEQ ID NO: 335 - DNA, 466 bp, Homo sapiens
  Genbank Accession No. AI073992
taaatctcattgcatttcagtttgggtaactttggttgacttatcttcatgctcactgattgttcaatgatgtccagtctattgatgaactcattaaatgcattctttatctctgttttccattttaaaaattttttatttggctctctcttgtagtttccatctctttggcgacatggcctatataatcttgcatgctgtttaccttctccataagagccattaacatattgattgtagccatttaaattctttgtctgagagttctaacatctgtgtcaaatctaattctacttctgatgactgctttatcccttcagactgttatttcttgctgttttgtaagtcttgtaattttttgttgaaagccaaacatgtcatctaggacagtggattccaggtaagcacattgcatgcttggagatgaggatgccttcctcctctgttagttcttcagtgtggaggt

SEQ ID NO: 336 - DNA, 391 bp, Homo sapiens
  Genbank Accession No. AI078033
tacgaaatagagtcgcccaggctggagtgcaatcacgtgatcatagctcattgtaaccttgaacttctcatctcagactcccaaatacctgggactacaggcatgagccactgcagttgcctattttttttttttttttttttgtagagacgggggtctggctatattgctcaggctggtctcgaactcctggcctcaagcaatcctcccaaagtgctgggattacaagcatgaaccttcacacccagcccctagatattcctggaggccagtttgcattatatccagaggacaaccacaaaattctcatgccatgcccttcccaaacccctaggggatcttattttcctccactacaggatggagtattcctacccaaccagaggatgag

SEQ ID NO: 337 - DNA, 456 bp, Homo sapiens
  Genbank Accession No. AI078121
tttttggtatttaaaagatttaatacaggaaaaaagtattgtatagtggtaccaattctcaatacaaattattaagcatagtttatataattccaaaagttattaacattattgctcgataccacagttgtatggaacaagttcttgacacacattaaaacttgtataatttctggtttataaaaacaaaaatttacacataggtcattcacaaatctaaaagtttaaaaatgcatagagatatgcacaacaaaaaggagaaaaaattatatgtatttgtgtatatgtatatttaaaagaaacaagctaatctgatttaacatgtatgtcacactctcaatcaaaacaagtatacataactgtactgaaagtgaactagtggataaaaatagtactaaatgcatcctccatttcttattaacaatcttttctaaatatcaacgggatattaaatac

SEQ ID NO: 338 - DNA, 609 bp, Homo sapiens
  Genbank Accession No. AI079545
tttttttttttttttttttgctcaggtaataatttattaagtcaatttaaactaaacattactaccattgcaaaagcatttgctctgaaaagggactgaaaaatgcatcataaagttacatagttcagcaacaatatcaatattgattatataaagtaaaactactggcaaacgtcatttaagcttaccctgtaatttttaataactttataaggagcaaatgtgtcaccttaaaaatgtaccagtggcatttacaaattccttcaaactcatttacaaatacagtaataaaaattcctgagctcccttttcttacaccagtattcaccaatcaacatccatgcggtgttttatttgacccacatcctctttccttttcttaagaaaatattttatcacattcgtaaaagtatctgtgcttcaagtcagtttgtaagtatctgtttttaatgtgaacctgatgataacaagagaaaaatgcttaacattagcaggggcagcaggaattgaggggtggtgtgggggacagtggaggagatgtaaatacaagaattccagtttaggtgttgggacttccaaggtagaatacatctgacaatatcaaaaaca

SEQ ID NO: 339 - DNA, 574 bp, Homo sapiens
  Genbank Accession No. AI079558
tttttttttttttgtagtaaaatggccagatgtttattattttgttacattatttccattgcatattccacatctatttattttcacttttatttattatcattatttttcacaaaggtacaaggaatttcagaaacaacattaaaacaatcattcaaactgtttcaggcacggtttcaattaaaagcatagatttgatttctgacttcctgtttccttctatgatacaatctcaagttttgtttcaggaagcacaattattgtagcgttaaggtggatacctgccaaagctcatctcctagtgctgtcctcattctcagaaagttcctgagtcaacagaaaggggacgcccagggtatggaataaggagatgagagcatgctctgccaactggctgggacctgaatgtgctaggcaagttccactacatcagctcaagaacataaacaaaaatgtaatttaaaaaacagatggtttaaaaaaatatctgataaaaattacctatccctctcccttgctgtgaaataatttaaataatttattctagatgtaaaaataataatacaaaaaagtt

SEQ ID NO: 340 - DNA, 492 bp, Homo sapiens
  Genbank Accession No. AI080631
  misc_feature (1)..(492): n = a or c or g or t
gtcccagctgaagcctacttcttgtcgcccttctgcgcgtcgccctcgtccgccgcctctggggcccgctccagcttctgtttctccagctcctcctgctcgcatttgctgctggggaacttgtctttgttgttctcttttttccacttcatcctccggttctggaaccagattttgacctgtctctctgtcagtcccagggcgtgcgatacctcgattcgccgcttacgagtcagatagggattaaataggaactccttctccagctccagggtctggtagcggctgtaggtctgtcggcctcgcctgcgtccggcggcttgcgggcgcatccaggggaagagctgtgtgggcgacgggctctgctcggagccctcgncctcctcgcccaggccgctggcggcggcaagcttgcagtctgcgtactgcaccaggtctggatcctgcgcaccgaataggctctggcgttgcagcgggtcgtagccgtagaaa

SEQ ID NO: 341 - DNA, 449 bp, Homo sapiens
  Genbank Accession No. AI083598
cacattcaatgtttagattcattttattagtggcatatacaaagcaccatataatatatgaaacgtagaacaatcatgactatgtaattaactgtagaaataactgctaagaaaatatagcaatatttaacacaggatttctaaaaccattatattttcattacttttcccaaagctaatgtcccatgttttattttatagactttgtttatcaagatttatatgcatttggcacctttttgggctgaaaatagttgatgtactctgtacagtaatgttacagttttatacaaaattcagaaatattgcatttggaatagtctttatggtcctcttccaagtattcagtttcacacaacagcaaacactctgaatgcctttcctcctggaggattctgtaaactttctgagaagattccattctgaaaagaagcaatgtaggtctttct

SEQ ID NO: 342 - DNA, 722 bp, Homo sapiens
  Genbank Accession No. AI086614
  misc_feature (1)..(722): n = a or c or g or t
tttttttttttttttttttacactgaacagagaatattttttttaaaatggctagccaagcaatcacggagaaaggaaaagaatagcggcgtgaaagtaagaattccaggctgacttgaaacaatcatgcaaaggctcgggggaggggaaggaactcgggggtcctcttctgagagccttggtccagtttcaacagaattgtacaagaatgcatttctgttttattaaaaaaatagacattaaaaaaggcacttagagggaaatacaaattcaaaatccaaatcctcataaatgtgttcctgaatctagacattttcagaaagaataaacctccccccaaacataagacccagaagaaatatccaaacagaaacaagatgaccatgacaatgtcaccagcaagagggctgggagtgcccttcctatgtggggaccgtcctgggggaggacgggagcccgggtcttctgtccgatgtcactgctgtcccttctctcgacgctggtggagggcagaggtgggggcctcctgaggttgttcaggtttcagaagttacagactcgaatgcatcccaattccacttgcgccgncgacgcgacggacagccctggcgcgccggtcccgaggtgggggcgcggcgctagtgggaggcggacatggaccacgcgcnctccatgcgccacacggagaaggcgtagctgaggcgctcgtggggcacgtaact

SEQ ID NO: 343 - DNA, 480 bp, Homo sapiens
  Genbank Accession No. AI087975
gccaaaatcagaacttgcaagatagggcagttacaggtgacttctggacggtcctgtttctagccacagagaaggtggaagcctgggtggattacaaaagaccatcgacgaaataggatcctgctagaagaatttttctagtagtataatttaaaacaactggattaatccaaaagaccaaaactaataataaaaatacaaggagataagcaacaaaaacagaggagacaaaataaaaaaaaaaaacagcaagataccagacataaattcaaccatttcaataaatgcattaaatgcaaatagtcatttcaattaaagacaaacattgtcagactggattttatttttaaagatggtgcctcgccatgtcgtccaggctggagtgcagtgccacaatcatagctcactgcaggctcaagcagtcctcccatctcagccttccaagcagctaggaatacaaccaagaaataccatgaccag

SEQ ID NO: 344 - DNA, 749 bp, Homo sapiens
  Genbank Accession No. AI088609
aattatactcttttattgaaagaaaaaacaatacaatggactttaaaaagctacatttgttatggttcataaggacagaggtttacacaggttttatatatgtacacactgacaatactatatcacaacatcagaggcaccatttttgccacagaattaggtaatgaataaaacttctccaaattaatctgtttaaaaaatatctaaaatggtacagtatatttgaggattatataaatatgtgagacatatttagatattttttaaaaatagtgtttatatatatgcatcacaatcttctctaattctcaaaatattatggcaccaaaattctgtttgtcaaataaaacacaagatgctgtaatatgtatccaagcaccagcttagcacagtatttaattctcccccaaactgaaagactgctaacaggtacaaactgaactgaatatttcaaacaaccattgaaataatttaggccctcaaattttttttttattagctgattgtttttagagaaaaaagagggagctaaaccatttagattaatgttgctctgtgtgatagaatcaatcctagggctcagagaagaatattcctaggcactggagaaagtgagaggaataagtaagtccattttatgtatactacaggttggagttttgcatgtgaattaattcataagaaaaggtctactgctttaaaataagtttgaaagtatcaatttggaaagtggctcaaggtaaatcttc

SEQ ID NO: 345 - DNA, 437 bp, Homo sapiens
  Genbank Accession No. AI091154
ttttttatgtgaacatgttgcatttataaagaaatgtcacacgtacacacagaaaggtcatatcaaagcaggtaaaaattaagacaacatatttctccaaaaaccagtctgacatcttataataccagaaatatacacacacttcaaacctgggaaatcatcctatgaatctgctctgaccaatatggtagccactaatacctgaaatatggagtaaccaagtaacaaatttttaaatttaaaactgatactcatttcagttattggaaaacttttaagcacatttagaccaacatgggtatgtaaatttactttgcaaatttagattttatgaaatctaaacatggattaagtattatcagtaaaactttagtgtctcaactgagatatgcaaaccagacagacttagtttcataagaatgaaaaatatcttactg

SEQ ID NO: 346 - DNA, 516 bp, Homo sapiens
  Genbank Accession No. AI092936
  misc_feature (1)..(516): n = a or c or g or t
taaatacaaatgttttattacgcaaaccacatgtaggtcccaggctcaggggcttaccctacagcccccactggtccctggctccaagcctgctccttgcccttgcccaccctggaaagccaggatctcctatggagtgtgtaggtgtccacgagtgtaccggtgtgcgggcctcctgggctgcaggcactcaggcatggtggcagcattgagggaaagacaggtgttggggagcggggtccccacctgcccaggctcaggagtcacaggggtctgcacagtcctttctgctgtggaacacgtgatagatgctggtcggggggaacatagcaacagcgccgagcagagagcccacctggatggccacgccggctgccagcaatgccggccggcccccgccatgcagcagggagctggctgccaccttcacgtangagaacacgccaagacacagcacccacgacagcacctgagggggacacagcaccagctgagcgtgagatgtgcctgctccag

SEQ ID NO: 347 - DNA, 358 bp, Homo sapiens
  Genbank Accession No. AI093702
tacagaaaacaaagactcgtccctcctcatttattttggaatgtgctagaaacagcttgaaacatccctttaatagcttcctggcctcacgagtgttgaatgacatgacgaattctccttcatagaaggtacaggtgaaccagaactggaggggcatttgggatccttccttcttcagaaagtgcgatcgatcaagatgcatgtggttttcagtagaactggcccatgtttcttgggagcgaggtgtccaaaccactgttcatccatatttcctgaatgatttgctccctgcgctcaatcctttctgcgagctctgcagcttctatggaactgtatataggatatgaagtcctacaga

SEQ ID NO: 348 - DNA, 331 bp, Homo sapiens
  Genbank Accession No. AI094535
cttagatttaacacattctatcagagagtacatgatatcaccatgccttatcattggtgaagttaaccttgaacttggttaaggtgctgtctgccaggcctcttcactgtaaagttactgcttttccctcttcatactctgttctttaaaagtcagcagtccagtccatattcaagaagaggtaaattaagttccacctcctgaaagtgtgttctacatatattatttggaatttttctgtaaggaagatttgcttcttttctgccaagtatttatttagtcaatcatttatttaaatcaacatggatttatagatattgactttattttt

SEQ ID NO: 349 - DNA, 566 bp, Homo sapiens
  Genbank Accession No. AI096389
ttgtttgaagctttcctttttcccaaagccaattcattttacaacgaaggacaactgagcagccggttaagttatgcctttgttttcagagtggagtttatagcctcactagaagatttacaatccataaggccataagatgatgctgtgcttagatgaacaattttatagcgtgaagatactaagacatcccccaagagagtttgggtgctagatcagttatttattgggaattttttttctcttacaaaaccaaacaaaaaattctgctatggttcccaagcaacttataaatacttatctgtattttctcttagtgccttagtatttatatcagcaagtgccatcttacaatacaaaacaagccaccaaagaaactgcaacaaccgaaacaaaaacaagaaatcaaaaaccttcagcactaagatgatgtgacagattctacatattccacggtatacaaaatttaaataaggcttagcaaaagtaaaaaggatggtcacattcaagcaccaaatagctccagcgagtctctttgttacaaaaatgctgctctgtattaagac

SEQ ID NO: 350 - DNA, 464 bp, Homo sapiens
  Genbank Accession No. AI097463
ttgacatgtaagaagtggttttattccaggtgtgtgtttcataaagacgaggtcctcaaggacagctagtggcacatgctttggtcaagaagaggaaaagcaaaaacagaacagggctgcgttgccacaaaggaccggctgataagtgcagagcctgatctgaccacagcaaaggacagagagaccctcttgaaggccctctggtcagcagtcctcttacattcaacaggcgcagcccctgctccccagccccaaaggtccatgcccgagtgtggcccaggccttctagtccatcctctggggagaggcctttgccctgggcccagttctgtcctaagctgtggcaggaggcttcccagatgaacaggggatctgaggctgcacctggctgcggaagaaacatcacgacagaggacaggcaaagcatggccctgggagcgaaggggcctgcgctggcaagtcca

SEQ ID NO: 351 - DNA, 585 bp, Homo sapiens
  Genbank Accession No. AI123555
ttttttttcctacaaatcacagttttcctcacagtgttagacttttaggtcactctgatgtagcagtaccttacaggatgaggggccactgctcgttttttccatttgacctttacagtccacatggtccagttagttgaagccacaaaataaagaccagagacagcaaaattattgctaatgtgcaactatattagtagaatgcaattaactgggctaactaatgtgtatgttaatgtctttttttttttcaaaaccaacatcatctaacaacatattcttttagtttttccataaaacctgcattgagaatgatatcatagccccaggcaggcatttaccagactgaatgttttgctgatctgaacactacctgtattccaattttttggctaatgcatggttttgtatttcaatatgttctcatacattaaataaatgaaacacaattatacattatagagtttatatgcatcatgatgatataatttgagaaattatctctatagattatgctaacaaaggattcttaggaagatttttcaatgtactagccagttaagttgatctatctgtttgataacc

SEQ ID NO: 352 - DNA, 453 bp, Homo sapiens
  Genbank Accession No. AI123738
tttttttggcacattagaattatttattaaatgctttatacatataaaggtaggcacttcataaaatttgcattttggtaaaaggcaacaatttgatgtcagtatcttaattgtgtcattaacttttttaagagaacagattatcaaaattttacgaagaagaaaaaaataatagttttaaggaaatctacagaagggaatctgaacttcatttcccactttatttttgcgagtctgttgtgtatcttcatggtcaagttctgagatttttgctccctgacctaaaatcctgtgggaataattgatttctcatcttttacttggaagtgaagtgtctgctacctgtggaacttgatacaattttttttttctccccacagttagaataacctttattctgatccactataaagccagatgatttttaggtggcagtagctggcattgaagagt

SEQ ID NO: 353 - DNA, 416 bp, Homo sapiens
  Genbank Accession No. AI124631
cgagacggagtttattcagggcagggccacggggctcagtagcacacgccttccacgtctgccacgaccacagacacgttgacgtgggtgggtttacccgccaggcggtcgatggtcttctgggtgaagtgctcggccaggccctcatggcccaccacgcaggtgtagctttcattctggttccagtcctcggccggcacgcgcagcaggctggtgacggcgtaagttgtgggttcctggccgggctcatgcaggggcttccacaccaggaagctgtctttggggacctcctcgcctttgttcgtccagtacaccagcacgtccttggggctgaagccccgcaccaggcaggtcagcgtcaccagcgcgttgagggccagctcctccgatggcggcggcagcaggtggacctgggg

SEQ ID NO: 354 - DNA, 406 bp, Homo sapiens
  Genbank Accession No. AI124882
  misc_feature (1)..(406): n = a or c or g or t
tgtaattgtgaattttttactgctaatttagaatgtccaactcactcctacagatattacaacttacaatacatgacacacacaaaaaacatgtcaaactttgctgtagagctgttagagaaagccaatatagatactgaaaattttagaagcttgtatttaataccctatacatttcaaaataattaaacattttaaatatgtaaacatagttttcaaaaagtgatgctgagcacctttaaacacaatactgatacattgtgactaaacatgcatttagatgacaatgaatttttaaaatctaatttagaaaccatttttaaagagctactccttgaaatacttacatgaaaatattgatagctccagtttctacctaaaaaccanaagagtatataattaggga

SEQ ID NO: 355 - DNA, 466 bp, Homo sapiens
  Genbank Accession No. AI125252
ttttttttaacagtaggtattgagatttttatttaaacagtaggtattgagatttttatttttctaccttataagacatacaataagacatacaatattgttgctcagattcagggtgatggtaacatttagctcagaatattcccattctgattaatttactgaatttaggagtgcaagtaatttttagataataaactatgggtatcacatctggctttcaattagctgtaaaatacttattgtgatcaatatccagttgttacagtttggaaggcaaagtaccactaccagaaaaatgctgacacctttcagctgaaccttaaatgccaataatactgtatctttatcatagtgggtttgccagccatcttgtttggtcaggcatagtgcctgacttaagaggaaactgtgggcactttgatggtgagaaacgtcctctttccaaccttcttcttaggctttg

SEQ ID NO: 356 - DNA, 512 bp, Homo sapiens
  Genbank Accession No. AI125923
  misc_feature (1)..(512): n = a or c or g or t
ttgaatgaaatgattacaactcatttattgaaaacatgcgtggctcttaaaagagcctttgggattaggtgtaaagatgcttacttggcaaagttacttggaactggtgtacttggtgacggccttggtgccctccgacacggcgtgcttggccagctcccccggaagcagcaggcgcacggccgtctggatctccctggaggtgatggtcgagcgcttgttgtaatgcgccaggcgggaagcctcgcctgcgatgcgctcgaagatgtcgttgacgaaggaattcatgatccccattgccttggaagagatgccggtgtcgggatggacctgcttcagcaccttgtacacatacactgaatagctctccttgcggctgcgcttgcgcttcttcccgtccttcttctgagccttagtcaccgccttcttggagcccctctttggggcaggagcagacttggtaggttcaggcatcgtagcgttatagnccttgtgccgaatcttagcctcga

SEQ ID NO: 357 - DNA, 529 bp, Homo sapiens
  Genbank Accession No. AI126237
tttttttttgtctgttaagatactttattttataatcaaaatacgcaatacaaacaaatggacataacaaagattcatataaataactggttataaactttatgaggaaaaatacccgtcagcatggtggctgggctcccaatgcacagggtggagaccaaccaggcggctctgcctttaagcagcaggagcccagaggctgaagggctggctgggtggggctgctctgaatggaagggataagtcactccataaataaaacacaaacttgtaaaaacacttaagaaagagcctcattcaggcccaggcatgaggtccaagatgctgccaacagcccaaagcttagcaaaaatcttgtagtggctgactggcccacacgtggcccctgcctggcctggctccagatctagaggaggcacggctggcccaacaaccagatactaacaagtgtgagatgctccctaaaccaggaggcaagaaaaaccagagggcaaaggtccctcactaaagccccagagaaacaacccag

SEQ ID NO: 358 - DNA, 581 bp, Homo sapiens
  Genbank Accession No. AI127289
tttatggaaaaatatttattcatatagagtgaaaatacctccaaacttagttatttgtagctgtcagatgagaagtatttcctaattacacccattcataaacactcattttatcacttcaaagagcaccagtgtattttttcaacaaaccagaaagtaagaaggtaggggcttatttcatgtaacagtgctattatgataaggcaccactaggtatatgaaaaagccaaagtatttccaaatcatgtgtttttgttactggtgtcttaaccattagacaggatggttagaaaaaagctgctaacattattaatgaaccacattatagcccctttcccaccattctgtgcttttagttttacttataacagaaatgaaaacaacaacgtagtacatgacctggttaaacaaacctcttttcccaaccttccaagaaaataacctaaaaataaacaagaaacaaaaaatttatctgatatatttgcaaaagcctatccctgtagaagagtgtgaggagtgggagaaggcagggggacctactttctatggaatatattgaggcacataggttacaagtttct

SEQ ID NO: 359 - DNA, 434 bp, Homo sapiens
  Genbank Accession No. AI128820
ttttttccgcaacacacacaaagaccggcatcagatttattattatctcttgttaaatattttcgatcttttctcagaacatggtctagaagggcatagtagtttttttcccggtacatgcgtgggtgggtagtgaggagaagggagcagaggtgcgcgccaggagccaggctggttctctgcagagaacaacctccagatcctcccagggaagcccgacacgccagtcccacgttggacgacgtgcagaggaagggggaggtccacggggacgacgaagatgaccttatacgtgcactcggcatatcctggagtaacgcgcagtgaggggaggtggggaggggagggtcggccgggcaagcacctgcccgctgcgcggccatgtcctgcaagcgtctggtgcgtgggtttggggggtcagagtggtggtcagt

SEQ ID NO: 360 - DNA, 647 bp, Homo sapiens
  Genbank Accession No. AI129320
actgtcaaaacgtttattgcaaaatggagtcttagaacaaaggaaagcaaagaaaagttcacatcaaaatgaaatgtatgacaccaacttggatttctgaatacactgtggactttgtgctggaatatcaaattccaactataaaatcagtaactgaaatagtcttaccacacaagagtaaaatttaatcttccatacaaacattatacaagatatttggcataggacttgctcagaataacattgcaatagaataattgagaaaaagtttttgttaaaaaaacaataaagtgataatgccatctattcaaagctcacactcaaagaatataaatattttctattatttagtacaaaaattttaagagtgcaaaagcaatatgtgcagtgtatcatatctgacattaaaagatatactattctgcacacaatataaaataattaatgtaggtgcttggaactctagttttgaagtaaataatcacatgccagaaagctcctcacaggcaacagagtgcaaacaaaggtggagtctgagaaaacacggctagtcttctagatttcctgatggatactcatttttcatcatagaaatgctgtatctagagctgtcaggctatgctacaatcgagaggagagaatagatt

SEQ ID NO: 361 - DNA, 595 bp, Homo sapiens
  Genbank Accession No. AI129626
tttcagtttttcctgtttattatatagttattctaaggtggtaagtgtcacaaagttaacttcaagaggaataacatggtccagtgtgaaacacaaggtacaacattttacaatgaaaccacagcacaaagtaactgaactttcaaaattgggtagttcaatgaaacattttgtcaacccttagctctataaagctctgctgatggacttagttgatggatttaaaaaatatattgctgtgtcaaatgttttaacacaaaatgtttttttttaaagagaatacacatccaatcaactgaaactgtgagcagaaagtatgtaacctctttataaaaacgttatccaaatttacaacattcataatatatttcaaagtaaagagttcttagaaaaaataaactcaattccttgcttactgatgagtatcaactcctcaaaaacacatcacagaaagttaactttcatacttctttgcctataacttttagatatctactaccctggcttcaaaaacattttgtggccatatataatacaaacactcaggtattacatgcatcatttatactatcttggaatttatccataatctact

SEQ ID NO: 362 - DNA, 484 bp, Homo sapiens
  Genbank Accession No. AI131078
gttatttataaaatatagggcactaaacaaatgttaagacattttaataatatttcactgatagaaaaaaaaaatcctgcaggagaaaggaactggcaacaccttgctttctttggggatccacacaaaaggactgtcacacactcacaatgactcttttgcaagttgagcgtatcagtagaatctcaggataaagaaagatgacctctgtccccgtccttgaaaattcctgaaaataccaacccatataacagcaaaaacaatcctagcaaaatgggccacagttctttcattccagtgtcctgcttgagcggggatagccctgccctcaattagggcagaaggttgggcaccctccctgggaagtgagtgtcagtacctcaaggggacaagcagccgtgagggtcaccaaagtgggtgtgaaggaaggaggcacaggtgccagacacagagctgggcaggagggtgggccctggaggcttgg

SEQ ID NO: 363 - DNA, 570 bp, Homo sapiens
  Genbank Accession No. AI138998
ttttaatagtttacatttattatttattctataccaggtgctgtcccaaaccctttacatatattaatctgtgctgattgtatgtacctactcctccttggacacagcatggacataatcagagaaccatgcaaaactcaattgcaaattggatatatggatgggattctttattattacttaaagtttactgttctcataattacaggctacaacttagaggtttgaaactttaagagaaaattctataaagagagctcaaataaacatgaatcagtatgtagaagacatttaaaactttgtaagtagtgccacttagctctgggcaatacttatctgtccttttcaagcacaggccctggagccagagtcaacaacataaaataccacaaacgactctaagacattcattctacacaggcgagcacatatacatatatatttatataatatatacatactttaatattatgttggtccacggggtatacacattttaacaaaagataaaaatctatgtaatccagttaaacatacataagattaggatacatttattacattgaaagt

SEQ ID NO: 364 - DNA, 484 bp, Homo sapiens
  Genbank Accession No. AI139629
  misc_feature (1)..(484): n = a or c or g or t
tttaaatgctggaaaaagtagatatttaatgaaaaatggattaggtactataaaaaaattaaactggatattaaatcattcccttaatggaagaatatatttacttcttctgtttcattaaacactcccaagtcttcaagttctctcattcgctgtctacgcatcttcttcatgtcatccattttttgaagtacagcttcagcagtgttagttataagtttgtcaaacagcatggactggtttacaccactataacgacttctaatcctacaacttcgacgcacttcaacatcaccattatcttcatgtaagtgttctgtactttgaacgatgtttctagccctcaatgaccgagtaactggaatcactttgtcttctctgtgctcttctttttttttatcagcctgctgtctggccaactgccttgtaaaatgcctgccattagcaagttgctccgttatttccacattcttctcanaactag

SEQ ID NO: 365 - DNA, 610 bp, Homo sapiens
  Genbank Accession No. AI140764
tttttttttttttttaccaccaccaccacagccatttattaagtgcttgccaggcactgtgctaaagctttacaaacattgtttcagttattccaacaaccctgaggtagatattttcaacatgcctccctccacccatgttattatagttgaggaaactgaggctcagagaggttaagtaaatcaaccaaggtcaaacccagctggtaagtagtgaagctagaaattcaaaccaactatatgtgactccaaaatccatgcctttaaacactatcctagattgtttaccattgaaagttaaaggacatatgctccttcccaaaatatgagaatagattttcagtgggaaagcaggggggagcccatatgtaaattctttcatcagctatgggactcaaactcttggaggagtggagagatagtctgggtataagctgaccactaggtcctctcatctctccagctgccagggcctttctcattaagatctctactcctgacatctgactacgcaatatactgtttccctttcagcaaccactgggatgcagaggtcaggcacatttggtgacacagagccaaagacacctcagagaaattaggagacact

SEQ ID NO: 366 - DNA, 426 bp, Homo sapiens
  Genbank Accession No. AI140989
aataggaagagagtcaggttgtgaaactagactgtgcttggaggcgatgtattaaatattctgaagcattttctaattgtcagtccttaaaatgtaagaaaatctcaagtgttaaaattgaagactgggtgtgctctctgctgaaagttcaatcaaaagcaactgtaatttcctacaaaggtaactaggtcaactcagcatttgtccctgcttactggaaacaacaaaatctcaacaatcaggccattaacttatcatgtcctatatatagtttcaaaagaaatctaaattcactcttaaagaggtactagtacaattttacacataagatgtctcctagttatttttcttagacttcaaaaggaaattaccaccatttagactacaacaatacaaccctacagcaaaagtatcttccccttcttc

SEQ ID NO: 367 - DNA, 597 bp, Homo sapiens
  Genbank Accession No. AI141556
ttttttttttttggttgtggaatgcatacatttccatgtatttttacagtaaaaatgcattaaaaaatctttcacaaaagaaacttaaaaaatacaattagggtgttgagtcctcccccccaacattctttcaggcatcaactgtgtaacggagggagacaaattcctaaatcgtttgatttcatcatacaaaatactcatccattatctctcatcaagacatttacattaagtgggggaggggggcggcgggattaaggaaagtaggctcacaagaatcagtttccaatttaaggttacagcagttcaaagaaaactatatctttctgcataatgcatagtccctgtacagtacaatatttccaaacaaatctgatgtgtggaattcaggtgaaactgccacaccaaaaagtccacggattgagacaagcccaggtgggtagcacatagattttaaattgccaaatatcatcttacaacaagaaggacatcaagatgttaacttcaggatatattcccaaaatccaccttgatttcatttatttaaaactctggatcacaattgagagcatcagtcatttaacatcacagattttg

SEQ ID NO: 368 - DNA, 543 bp, Homo sapiens
  Genbank Accession No. AI144477
  misc_feature (1)..(543): n = a or c or g or t
tattttcatcatatatttattacataaatatatagtaaaatagacgagcaacaattaccataaaaatatctttctttaaaatcctgacccaaaacacaacggggtgaaaaatcgcacataacagacatactgattgtcaacgtggggcaggagtaggagcccctcaagtcacccctgccggtcccacccctccctggggaagagacctacctccttccctgtttctggccacacccccctccccccagcccagcaccagcttctcatacattcagtagcgcctctgggcagtgtccccctcccccccgcccaggagttcccagggcaggagttactgtcctccttatggacggtctctctctcacaacgccctgccctctcccagccctgcagacccgccaccaggagaaggggtaggggctcctcccccaccctccccaagtctgagcagggaggaggctggatgaggtatgtgtgttatgagtgatgggaggggcaataactgnaatggagaggccggtgggggggggcgcgggatgtcat

SEQ ID NO: 369 - DNA, 633 bp, Homo sapiens
  Genbank Accession No. AI146465
  misc_feature (1)..(633): n = a or c or g or t
taataagcagcttatagattttagcaaaccatatttcctatgacattgggttctcatacaggtctgcagttcaaaatccaagtttgaaatctgggacggaaggcattctggaaaacggagaatctaataaaatcaatgacgtctcatgttcgatgctggctgtcacggaagggctggccatctgttggtctgagtgtagctggtctcgtgaatcccactcggtacacaatcgctaaacactaaaacatgtcaagcaaagtacatggtgcgcagagtgtcttggtgaacctggaccgccttggccagtgcttggtggtctcgcccgttactctgcccagaggtatggcttccttcagcactgtcatgttccttatccaccaggtggtacctggcccggaaggccaccaggtgagcgtagtatgcttgcgctgggatggacacggagcgtgtgcagcgcacgtaggtgtgacacagctggtaggttaggatctgcagctcatcagaggagaaacgattgtcgtcccagaggacgtgatagtgcgaaggcctgcttgtcccctggatgccagcgtgactacacaggtagaagtcgaactcggtggggttgggtgttttcgtgtccacagtcgtngc

SEQ ID NO: 370 - DNA, 510 bp, Homo sapiens
  Genbank Accession No. AI148006
ttttacagatttgtcacaaagtaaggtgctaattaatgtttgttgaataaattactatgccaattccccaatgtgtacaaaatgaatatacatatgacctagtctcaggaaaaatgtatatgtggagaggatgaaagataatttttttccatataagcttcctcatctaacctgtttcatatccagtttctgggacagaaattgattaaactattctaacgtggaactaagcaatttaaacttatatttacatggtcagcatatcagccggtgatctcaatatggccctcaaattttgctgtcatggatagttgtatattccagtgccagaaaaaagtaacaatatattcacgagagagcagcctgatgcgctgctctagagatgaaaataaattgatataaatggagatactgagcaaaaaaatcagcagctagcacttatcagatgggaagtgaaaagatgttaactgagcttacaagaatgaagaatattgtcatcagatagttgta

SEQ ID NO: 371 - DNA, 527 bp, Homo sapiens
  Genbank Accession No. AI149537
tttttttttttttaccgtttcctcggttatcttttttattttttttgagacggagtctcactctgtcacccaggctggagtacagtggcacgatctcggttcaccgcaacctctgtctcccaggttcaaacagttctcctgcctcagcctcccaagtagctgggactacagatgtgtgccaccacacctggctaatttttgtatttttagtagagatggggtttcaccatgttggccaggctggtctcgaactacggacgtcaagtggtccacccgcttcggcctcccaaagtgctaggattacaggtgcgagccactgtacccggcctgtttattcagttgtctggagttgacaggacagtcctgagtccagcaggctgtggctgtggcccctggggtgagtaggcacaatgaggtaggtggtaggaggggcagcctcactgtctcctgagaggccctggggtctccgctccagccccggccttgaggcttcggggtctacctgaaggtgtgttcctggggggacg

SEQ ID NO: 372 - DNA, 480 bp, Homo sapiens
  Genbank Accession No. AI149637
  misc_feature (1)..(480): n = a or c or g or t
tttgggagtatcagtgatttattggggagcccccactctaaacaccagcagccccacgcatgcatcctcaccagaaataaataaggcggcattcaatgaaccagtctgtcttcttcctaaggagctctggggagggtctgcctctgcccacctaggggctgggatcccttcagctcttgaggaagggttggggaagggttgggggtgaanncnnnnnnnnnnnnnccatcctttacctccttctntctgttcaataaccaccactgaatcttttactgccctggattcttcttaatggtgatcacacgtttcacctcattctcagtgagttctcccgccttcttggggaggggaatggctgatttcctcaacaacccatgagcatatcttcggcccacacccttaatggcagtgatgggaaaaggctttttcccccgcccatcgatgtcggtgttgagtactagcaagaaaatgctgaac

SEQ ID NO: 373 - DNA, 505 bp, Homo sapiens
  Genbank Accession No. AI149693
tttttttaaaacagaacaagattatatttcaatatacaacttctgtataaccaaaaaataaaacaccatagtaaaatgaatgagaaaaaacatatttgcaattctagacaaaatgttaacatgtttaatcataaatgaactcttcagaaatcagtacaaagagactaacattacaagggaagtgaaaataaaaggaacagaggaaaatggaatagcacaaatgagttataaggctatatgaagatgatgtagttaacattaatagctgataaagcaatttcattataaattatattatcgatccttacaaatattgattatctgatgtttgtacagctttaggaaataaagaatactcaaatactgtggaaacttactagagtcatggggagtttactcaaaaatgtagatttttgtataaacttggccccagcagttccaaaccacaggaatctgtccaacaaagtaattagacacacacccacacacatacacatacatgttt

SEQ ID NO: 374 - DNA, 485 bp, Homo sapiens
  Genbank Accession No. AI150491
tttcccaagcccttgatgttaaagagaggttaatgagttgcccagttgacattaaagaattttccctggagttcttgggtcagggtgaatcaatgtggcacaaaggggaaaaaacccagccaagtgattgttttaagtgacttactgtttctacatagttagagtaataaaaacagaattgactagttgtatgcgtgaccttaggtacatagttctcagagggagatgttaatactaaaaaaattccttgaaaatcatacctcaaaactgccaactttggggtagtgggtgcagctggggcaaggagactagagaagagtaaagcagaattttactgttcccatttgccaggccaaatagcaaattgatttctcatcatatttgcatttactcaaattgactaattgtatttttacagtattttggaaacttgttcattagcagttagatactgaatttagcttcagacataggtggacctagaa

SEQ ID NO: 375 - DNA, 476 bp, Homo sapiens
  Genbank Accession No. AI160811
tttttttttttttaaaaaataacaaaatgttttatacacatttctgtatatacaactgaacaacattttacatgtttcttttgcacagcaaaagatataaacattcagctctgagaacacagttatgtacagaaaaaagtcaaaaatacttcacaacagtgcaaaaatattttacacagtatcatggagtgagatcttttgagcaagaggaagggtgtgtgtgtttctaaaggaaaactcctttttaagatattggatgtctttaactgtaaacaaaacgcgactctctttcatctccccccaccccccaaacagttatttgaagaatttggcaacatttcaggggtctgagtctgaggtaaacagccagaattcttgcaccaaaaagaaccaagggctaaagggttgcattaaagcctcaaacaccttgagagcaaattttttttttttttttaatgagatgtcagtgacagcgc

SEQ ID NO: 376 - DNA, 451 bp, Homo sapiens
  Genbank Accession No. AI161049
gagttttaaaatgtttttttcttcctctaaaatcaacatctggctaagcctgtgcagttggtggcactgaggcaccctcctggcctctggccctgcagaccaggtgcagaggccccccggccatttctggctgaccacccacaagttatcggcaaacaggcagccgtttcaaggcccttgtccaacccagccccaccagaggccacatgctggaaaagtcccattttgaccatattttcttgtggaatctgatgtccctggagggggcctaaaatttccacggtcattcccagggatgggtgatgctgttgatgtgaaggccgctgatggcgttcaggaagaggaggaaggaggcagtgaattcgcaccaaaacattagggtgaagccgatgagtgtgacttggttcctgaggaggatcacaaaacccaggagcccgccggaggagaggac

SEQ ID NO: 377 - DNA, 693 bp, Homo sapiens
  Genbank Accession No. AI161367
tttgaaccagaactttcttccagacaccatttccttcacatttgctcactgataatgccttaagaggatcgaatctctggaacagccctgaatggcagggatgaggctgctggcctggtgctggctgggacacagtcaaggagggctgacccaagaggcagaggtggctaggctgggtgttgacctcctctcttttaccaaccagcctagggcaaggaggggccccaccacctgggggcaacttctgtacaagaggtctctaggggagcagaatgggtgggggagccgggcaggggccacagggtctgtttgctggtggctgcccagtctcccagccacccctggagtccccagcccagggagaaggaggcccgaggagaggaaacagatctttcttcttcctgttggctcagaagcaggtgcccattcctgtcccaaggcgaagggtcttggaggccgcttcctgcccctgcctcctccaggcgctggagtctcaagaggcgttccccgggggacactgcatctccatggtgactgtgttgggcgtgctgccccccggcttccccagctcaagcgccgtccgcaaggcctgctgggaagacaccctgagccgctcccaacagccgttgggctttgtcccttccgggccagaaggtaaccgttggggctggcgctggttggtgtgcagatgca

SEQ ID NO: 378 - DNA, 443 bp, Homo sapiens
  Genbank Accession No. AI168057
tttttctgttaaaagcatctttttatttgctgtaagaatataatctgcatttctatacaatccattatgcaaaaaacatggtaggcattttataagcagtgcaaaatctcaacatctgtacatttgctccattaaaatattagcaaaggttgaaaaaaactcacatcttaggagaaaagaatacagatttgttccccaggaacatggcttccaacatcaagaagcacagccaagaaaacacagcctcattaaattctcaatacctaagatggaaggtattgacagataggtagggaacattatttgaggaggctactactcccatgggcctcctcagtgtgtagccaaatgactttgtacagcaagcgctaaagcatctgtgtataaacagataggaattacctgttgagttaacctaatccaggtggaacagacactaccag

SEQ ID NO: 379 - DNA, 467 bp, Homo sapiens
  Genbank Accession No. AI188749
tttttttttttttaaaagtcaagtataatcttattgcccagagattgcactgttaacatttttatacatatttttccagttaaaatgcacataatacttttttcttacagaactactacattgtatgcatattgctttataatctgttttttctctttaataatatggtgtgaacactttcccatgagattaagccttcttctgacacataattttaatgaccatctagtattccatcgtatagatgttaatttaaccaataccatatggtcgaacatttagttgtgtctatttttttgctagtataaataacacaatgtagacattggggagactgactcaggctgctcccttgttctggtcataagtcacttagtccttccttaaaagccattggtcatttgatgggccagacagacttcacaacccttgctccaaacacaaggacaaatttaatctactcaagc

SEQ ID NO: 380 - DNA, 468 bp, Homo sapiens
  Genbank Accession No. AI189011
aattgctaagaattttatgtagcaagtttgtttattcagtaacataatcacaaaatagaaatatcacattcacagaagtggaaataaagagcataaaatatttttaaaacaggaaagcaatgggatcactttcaagagcctcaaagaaaacctttaatttacaatgctacgctttcatgattaataggattaatgtgtggtttttctttgataaaagtagtcatgattttttagtattacatacattcattgcatatgacagactgataaaaatgtactgttctaattacttaattgttttggctcatttaacaccttgtttaaatagctttaagacatataagaggcaaataattatatatacttaaggataaaattttcagatatttatccaaacacacatttacccattaaattagaacactaactgcttaatatgtaaaactagtttgaatcatgactcttgat

SEQ ID NO: 381 - DNA, 477 bp, Homo sapiens
  Genbank Accession No. AI189255
ccaataacatactctttaatcacaagttatctgcttttaataatgcagaaattataaacccatattatttaaatctctcccccactgaagccatgaactagtttcaaaagcagcaacaaaaggatgacaaattgtttacatatatactatagaaatacacactgaactggcaataacatctttacaaaggtgaacaaagggagtacctgcaagtcgcaccacttatagccatatatatatattcatacacgtgtatatgtgtgtgtgtgtgtgtagcttgaagtggtccatatgtacacacacatatacatatatatatatagagagagagagagagagaacgcgagcagactaggtcctttcttgaaagactctctctgtaccttttcatcactaaattaaatctctaggctagggtgttcataagttccactgtaacttaggatttgctttttcctcttaacaaaactgaggcat

SEQ ID NO: 382 - DNA, 505 bp, Homo sapiens
  Genbank Accession No. AI190755
ttttcaaaaaaccatccatttatacagtttgtggttcagaagcaacaatatgcacaacggtggaacagtctgtgctgtccccaccccacctgaactcgccagttcctgtctcccaaggggcacagaacacaggccccctgcctggcaggacccgacttagttacaggcccctgggaggggcgaagcccttaggggtcgaggccaggagggaggaggaccagcacctgatgcccctgggggcccgctgggtcatggaactgtgtgtgtggagggtggggggtcagcccaccacgggccatttctccccaaggctaagggcgggggagcaagtaaagctgaggagagggcttcatgggacagggttcccatcccctgctgggagggtgttcctggataccccacaaggcactacagatgcagactgtaggcgagcacccccatctttggcccccgattgcctggctctccccctgccccagctcccactgtggtttggcgggggaga

SEQ ID NO: 383 - DNA, 347 bp, Homo sapiens
  Genbank Accession No. AI200456
ttttttttttgaccagaatagcttttatttcacatgaagctaaggaaggaagtcgagaggacagggctggttctgtgggcgctgcctggcaggtgcaccacctccaactgctgggctccagctccagggctcagaagccatctccgagaaggtcgggagcggggctgaagggtcccgggggcaggttccaggccagctcctccagcaggcccagcaggcctttcacctctgtccccaggtgatccacggtcttctctaccatctcctccatgacatctagacggcgttgcacagccatgtgtctgtcacacgctgtgctctgagctgagtctcctcgcggagggctg

SEQ ID NO: 384 - DNA, 570 bp, Homo sapiens
  Genbank Accession No. AI200954
tttttttttttttttaacttgaaattgcacttttattttaaaacagtgaagtgtggctattacatatttcacttttacaatcaatacatgttaggatcttacaagtattaaattgatgattttattatatataaatacacaaatggtccaaaacaatatctaaaatgttgcaatatttataaaatccataaaaatatttaattttcagtatgaaaatggcatactaatttgagtttgaggtaaatgaagagacagatttaggccatctaagaaggaagataaaggagaatgtcatatctatattttgggaaaagtcaaagaatgctaaagagcttgacctgttactgcattaatgacttcagacattatgcagatacatatactatatagtaataaataatacacaatgtagacagaacagaaagcagagggactggaccaatctgctcaaggaaaaggtaaagaatcttttaaagtgcagcaatcagggattcttgtgactaatgtgtttcactgaagacaatgtgaatcggtcataaacattaaccctttaatccttggaactttcct

SEQ ID NO: 385 - DNA, 373 bp, Homo sapiens
  Genbank Accession No. AI201273
ttttttttttttttttccttggttactgctttattgctgtttggttcgagtatagaaaatggaagcggctttggaagagcctgtgtacaaggtaggaaatatacaaacgaagaggagggagctaaagagaccgcgttccagcccagcccagcctgggctcgggatggggggccgccggggcgcatgcaataaatatggtccggggccgcagggaagggaagggagggcaccgcgggagtgggagacctggtggtaggctcttcgccttccgactccagaactccccgcccttggtgactgaggaaggaagggttggccctggggctagtgccacttgtgcaaaatgaggaacttcacattatcagtcccgggg

SEQ ID NO: 386 - DNA, 392 bp, Homo sapiens
  Genbank Accession No. AI201965
ttcacacttggcagtatttattgaggatttcaatacaccaggcatcattatcatgttatacatatttacagaaagtgtatggaaatggagtaagaaaaaatttcactgttactaaacagacctattagggtcattttgtaaataataataattataataagactctcgtaagtttccctgtccttgaatgctgtaaagaaacaaaacaaaaacatgagacagagaccactgacttaacaaatggatgactttattaagagagaaggacaagactgatgtttaccttggtcaaaccatccaggaaaacaaagcacacagacttatagaatactttggtttaaaaattattcataatatcaatattaaacctgatgtttaaagaacctaatgag

SEQ ID NO: 387 - DNA, 480 bp, Homo sapiens
  Genbank Accession No. AI201982
  misc_feature (1)..(480): n = a or c or g or t
ttcagactgcatatatttttattcatataaagttctttataatactttattttgtggtgttaagttccaccagttatttacaaatgatgtaaaaagctttaagtgttgttaatttctaaagtgttcttgcgttttcagaagtgtaagtggatctcagttgatctgtcaccccaaacctcaaatgatccatccaccctgcttggccatctaattcacctgctctccccagtgactattttgtacctttcctctccatagatgactttgcaatctacagggaaaatacttatgcaggacatcttatatctcccccttaccacgtacagttctctccacagctgccagcagccctaacctttttgtctctccacctgtgctttggatgctcttctcccagccttttcaggatctttgtctgtcctcctatattaatgtattcaattattctctcagctagatccttgctacttggttntaaat

SEQ ID NO: 388 - DNA, 453 bp, Homo sapiens
  Genbank Accession No. AI206014
ttttgagacagagtcttgctgtgtctcccaggctggagtgcaatagtgccatctcagctcactgcaacctctgtcttctgggttcaagcgattcacgttcctcaggctccagagtagctgggactacaggcgtgcgccaccacaccaggctaatttttgtatttttagtagatatggggtttcaacatgttggccaggctagtctcaaactcagattttttttttttctgaagacaaatgctctctgattggcatgctccagtcactgtctcaccatttaaagacttctagattaaaattaagcatgggctcaacagttctaaagtgaaaacatacatagtggagatccctgccttcttctctcctctcttcctttcctttctttcttttttttttttctacttcccatccttctcaaagagacaccagtcagaaatatagatatgcttatgc

SEQ ID NO: 389 - DNA, 504 bp, Homo sapiens
  Genbank Accession No. AI206063
ttttttcaacgcaacacacatcctgacaagtttataaggaccacgagaagtttagaggcaggaaataaatagtaacaccaaccataaaaaggctgtcactcactctagagtttaaaatgctcgtacgcaggtggcggtgggccttaggcaagccagcatgacagcaaagaaaggacggacccagaggagactccaaggatgtaaaaacatgaatgaaacaaaacatacaaccaagcctcaccacaaaaatgacaaccgtgtgaggtaatgcatttgtgagctagatttaaccattcccaaagcattgtgttgtgcgtgataaatgcgcactgttacgtctgtcaatttaaaaataaaaatgagaaaggccgggtgcagtggctcatgcctgtaatctcaatactttgaggccaaggtgggaggattgcttgagcccaggagtttgagaccagccttacataataattcttttaaaacttacctacacagagtaagtgaattata

SEQ ID NO: 390 - DNA, 369 bp, Homo sapiens
  Genbank Accession No. AI208691
gagcgggagggcggggcggggcagggcgggggcgcaggccacgcgggggcgcagggcgcgagggtgtggcgcaggctggggtcccggcggcgggtcctcgcggccggtgccggctcgtctgggacgcacggggccgcgccgccagagggcgtgcgcacctccctttcgcgctccgcaagccgaactgctttgtaccgggcaggcgtcggggatcgtttttgctttggtatcggtgatgtaaattcatgaattaaaattaaggattttgaaaagaacggggaagaacgcacttggatttaggttgtttttgaaaaggaaaaaccaaagaggaaatgatacgtttgcaggagcattaactgactactgact

SEQ ID NO: 391 - DNA, 461 bp, Homo sapiens
  Genbank Accession No. AI215667
tttttttttttttttttttttccattccatacctttatttaatctgcatcttctcagcctcctcccttccccgccaccccttaaagggcgtggaagccctcgttgaaagggaaggaactcctctttcctccctgggggagggtcagtgtcccctgggccaaaactcgttgatgggagaagcaagggcctgcgtggtggagcaaggacatcatccaagaggctgtggccaaggcccagcccctcggatgccctttaggcctgggccccatggatcatcaggaaagtgaagagtaaataagtccgggagggcaaggaacgggcgtccctgcgtgtgtgtggctgatggaggcaaacatggactttgggaggcaggagcaaaggccaggggatgtggggaccaggtgaggccctgagaaggaaccccaggttgtaggggtagctgcatgtggggggagtgactg

SEQ ID NO: 392 - DNA, 552 bp, Homo sapiens
  Genbank Accession No. AI218026
cctgtgggctagggggatgtttatcatatgtctgaaaaggcttgcatactctttgtcaatggaaaatatatattttactcctttaatataacctgcattactaaaatcgcagccctatatcaggtttctaatcaattatttgttgaatatataattaatagttgtcatattaagttagaacaagattgccttctgtttcttgagaaaaggatagtttgaacaatttcaaaacttacgtttccattttgaaactgtcttggccaacggtagcttgacattactcgtgtaaaaccataaggatgagcaagcataaatccaactgccattttatacagcctgaaagttacataattatattatcacagaatatcagaatatcattaccatcattaaaagatgtgttaaaaaaaatagagaacttggttttctacctagcatcccagaaggtaagaatagaggctcctccagccccatgtcctcgttgattgtcatggttatccacaaagacaagtgctctgtcagaaagcatgaaaccccaaccttctccccagt

SEQ ID NO: 393 - DNA, 411 bp, Homo sapiens
  Genbank Accession No. AI218358
ttttttttgaggcaataggaaacattttttaatgaacaaacaactttcacacaaactgtctgtatcacattgttattacaacacagatgagctgaaacgtttttgtacagatttggaggatgggaatcctaaaaagaaatcaagcatatagaggtagttgaatagcaatatggggggaaaaaaagcattatcttatatttcccttcagttcattacagtgcaagagtaaaatggctgcttaccaaacaaatggaaaacacacacacatttgccactgtttacgtggcttgcttgatattttaatcctggcattacttacaactgcataagatgatggaactaatttacctaaaataagcctatggtgccacattggcctatttgctttccttttattccattattagtgtt

SEQ ID NO: 394 - DNA, 705 bp, Homo sapiens
  Genbank Accession No. AI222594
tttgtagcatagctcatgttattgtttaaacagtttttgcataggaaatatatccgcttccagtaattgactgcagtatgagcagctgctagcagtataggctggatataacagtaaccaatcacataaagtcaagcttgatttacaccagtttaaaaccttggggcaattgaagtcatttgcaacccacaaaaagtacccaaagaaccgtatccttcaaccgggcaccattaaaccttcacttaccttctggcccaatctgggggtgatcccaaaagcctggacttttgaaattaaggaaccggccgattataccttcttctgttaagggttggtacattgagattgtgcatgtgcctccttttggaaaaaatttaattaaatacaaggttctgtatttatggccatgaggaccaatgcgcaaagttttaaagggtcacactggggtgtgatttagaaggaaaatgatcctcggacctcacgggtctaaatggttttaaggacccacaagctccaaagttgttctaaagaaatatttgggggggggcgtttttccggatgttaaagtcttattatataaagcactaatacttgtggaaaaacatatctgcgccttggaacctgcgggggggggtccctacatttaacgtgtgaaaattttttccaaaaaggctttaacaaattcaccggaacaaaaaagctgaa

SEQ ID NO: 395 - DNA, 620 bp, Homo sapiens
  Genbank Accession No. AI223817
  misc_feature (1)..(620): n = a or c or g or t
tttttttttttttttttcaaatttaaaaaacatttattttaataagactattgcaaacacattaaaaaaactaaatagtaatattacaaaatctatatacttgcacatttagtatttgtcaatgggccagaggttttcttcatgaaatttgacttttttgaagggaaggcttttttttatcatcttttatagctctgactgaataagtcttaatgctttcttcatgttttctatcaataggggtaaatcccgaggctcatatgtgtacaatctgttagagtatcttccagctatgtcagctctaactgttaaagaagggtctacaaacatgattctaggcacatattgcccatcaggtgataaattcttatcaggggtttcatgcataaggtttagcatgatgaacttattctgagccatttcttgtatttcttcattttgggcaaatacttntctttagtgcttgagagtattgacaatcctccaggggatgaataaccattaatggcttcttacttttttgagcataaaagagaaccttcttcataagtttgtaccccagtgatgtcatctccccaatcctcttgagaggggctgaggaggcccctttcncttnttat

SEQ ID NO: 396 - DNA, 445 bp, Homo sapiens
  Genbank Accession No. AI242023
ttttaaacacagtgggttgccagttactgcgtgaattttctggcgctgggacaatgaccttccctgcatccacaggagccctctgagggagctggccactctgcctcctagtcaccgtgaggcttgttattaagctactgtgtatgtctgtaccttttgtaacatggacctgctgtccacaaggtaacaaactaaggctgtcatggatgcacactagggtttgcaagttaaaatttaatcctggtcttagacatagaagttatttttaaatttaagtgacacatgctgcacaacaaaccccaggttctagctttcactctacttttgcagttaactacatgcagtcaaaatttaaaagtgccaaacgctagcagatcaaatccataacattttcaaacagatgaattttatcacttacaatgtcaaatacaaaaagtgtatggaa

SEQ ID NO: 397 - DNA, 465 bp, Homo sapiens
  Genbank Accession No. AI242160
  misc_feature (1)..(465): n = a or c or g or t
taatttcgtgagagataaaataatgttgatttggcagatatacaggtacaaactctgaagagtttagagtgaggaaagaaggtctctcgtgatgtgccaaacactttcaatgcctcatcctatttaatcttcactataacccttcaaggatgattttatcatccccacttgacaggtgaagtaattgggcctcaagaagctatgttaatgagatagcatcgataaagcctttggctccagaaggcactcaatcaagttaatgttctttcttccttgggtaacttattccaagtcactggatcagtaaggggcaggagcagaattcaaacctggacctatctgattccagacacccctgggctttctgtctcaccgcactgcccagacactaacaagccgttgggagaactgatgaaccgaatggagaccactgctctnttgctgttaaacaaagtggccaataat

SEQ ID NO: 398 - DNA, 555 bp, Homo sapiens
  Genbank Accession No. AI244908
  misc_feature (1)..(555): n = a or c or g or t
ttttcattaaaaaatagtgctctttattttaaattactgaaatgtttcttttctgaatataaatataaatatgtgcaaagtttgacttggattgggattttgttgagttcttcaagcatctcctaatagcctcaagggcctgagtaggggggaggagagaggactggaggtggaatctttataaaagacagagtgattgaggcagattgtaaacattattaaaaaacaagaaacaaacaaaaaaatagagaaaaaaaccaccccaacacacaactgccctgtccagcccaatacctgacacagaatactttgtgtttgtttagttgcccccccccacaaaaacaaaaacaaaaacaaaaacaaaaaactgttccaggtaattccatcgctgctacattcctgtaaattgtcactgatcagtgctatggcagagcgggagcaccccgggtggcagcagtccagcctctccaatgacctccagcctcccccacccaggcaggagggaaggctggcagggctncgggcagtgggacctggtgctctgcttgaccacag

SEQ ID NO: 399 - DNA, 362 bp, Homo sapiens
  Genbank Accession No. AI247837
  misc_feature (1)..(362): n = a or c or g or t
gagaaaaagaaaaagactggcacttggatctttgttctgtcaaattctaggtatatacgtttattttttcagttctttgcagtgaaaaataatgactttttaggcacttgaaaccaggtagaataaatacaactgtgaagattattttattttatagccagcaattggagaaacgaattttaatgtaaaaagcaaatagatcctagagtgtaaaagttttttttttttcctccaaagtgaggtctatgtgttgctatgtctgggtgcattggggaattgccttctgatttcattcttgaagtatacaaaaaatatntcagtgtagggtaagtactaggaaaaagctaaaatgagaagatact

SEQ ID NO: 400 - DNA, 482 bp, Homo sapiens
  Genbank Accession No. AI263819
  misc_feature (1)..(482): n = a or c or g or t
aaatgatgaaaataaggtacaaaataccttgcttcttggactgattttaaaacgcttggttatacctgatggagaatctatggattgcaaaggttgtggctgatacagcagtaacccctcccttcccctgagatcagtattttggtgaaaaaggtagggaagttgccttgagtacaaaaaaagagaagagggctaaccaatagcagcggtgtggcagacagcacagtctgaatttttaccaaatgcgagataaatagcagaaattgtgcataagaaagaatggattctcttccttatgctgagaacaggcctctctcccaacaatgaggagctcttcccctgaggaggagaaaggatcttgtttagggctttgacctccattgaaggacagtgttcagattgtcatcaacaagcagagagaacanaggaggtaccagaacagggagcaaggctctactaccccagtgagacaatgacaccta

SEQ ID NO: 401 - DNA, 556 bp, Homo sapiens
  Genbank Accession No. AI264135
tcttttcaatgcattttctttccaggctctttagattaggttttgaaactcagttggccagatgagatttagagtagtgtctatttattgccacataggactaggtgggctctaaaggaaaaaatgatagaaacaaaaatatgacaattttttcttttgttttggtttgttggtgaagtttgccagttgaataatgagggctgggcacagtgggtcagggaaatagggatattgactcctgggagttctcaaactgttgtctttaagatttttttagcaccttcatgcctcttttccttatgatttccctaagtctgtgattaagacccgaggcccttctgtcagcttcttgtacacatcaaggctaaaagcagacatacctacaggagcaggcaggtgacagcacagatgaatgaggaagagggtggtcacctggggtggtctcaggttttcccctccagctgataaatgccaggaggaaacagagccaaaattatatggtgacgaagacactgatattgcaaaagaatctgggtattttagcgaagttgtttgg

SEQ ID NO: 402 - DNA, 396 bp, Homo sapiens
  Genbank Accession No. AI264299
ttttttttttttttttttttttttttttttttttttttttttttttttttgctgcaaaaaggcttttactgggcaaacggggggagtttcaacccaggggaccagtgaggggggagggcccctcctccaaaggagcagggggggcatccctgcccaggggccttaacctgaatgcactaagggctggccccttaaacaggctcaggggaggtccccccacaagggttttgggcccctcccttataaaaaccccccccctgccatgggggccggggcccttgctatcacatttgccttggttgatctcagggagggtgatctctttcagggaaaactggggggggggagatttacccttgggagggcccttcaaaaaataggagtggggggtgggga

SEQ ID NO: 403 - DNA, 553 bp, Homo sapiens
  Genbank Accession No. AI266650
tttacagcaagaacgggtctgtttaatgacacagctgggtctggttaccaacatcagaaactagaaaaggaggacgggcggttgcacagatgaggatgaggatgaagatgaggatgaggatgggccaggaggggacacagcaggagccacagcagcaaaacatccttgaagacgacacacgtgaccaaggggcacacacggggggcccccctggcaagcctgacgcagatgaatagacagggccgactgccggccaggaggagggtggggtggggaagccctcggccctcggagctgagggtgagacccaggcatgtggtcccgccgacctgctgcccagcagcccggatcccccggggctgccctggtggccaaggcaggtggagctagcggtcgaggtttctggactgaggcccttcccagtgcgtcatccacccagaactcgctctgccctgccattctagaccagcggtgagtcagtctctgaggagtaggggagccacttcttctgccctgaatgaattaagatgtgggagctgtctgagaaaggctg

SEQ ID NO: 404 - DNA, 349 bp, Homo sapiens
  Genbank Accession No. AI272054
gagatctgcatggttttattctcggtacaagaaaaggggctagtagcatgctttttttcttccccctctattggaccatttcctgtaacactaacatgctttgcctcaaacttttcttgaggtcttttttaggcatatggctcaatctattttatttttcaatatgggctgtagttcatatattttgaagtttcataatcttaaaaaaaggaaatgcaagtgtagcttggcattttagatctgggaaggacctaagattcgctaaggattggccattgctgtggtctccatgtgtttcccctaaatttgtatgttaaaatcccaacccccaaggtgatattagcaggtg

SEQ ID NO: 405 - DNA, 444 bp, Homo sapiens
  Genbank Accession No. AI275140
  misc_feature (1)..(444): n = a or c or g or t
tatgttttcaaagaacatttaatcacagaaactttcaaaatattttgtacattgaatagatccgatcaccaagcagtgcatagagtaggatcctaactttgtaaaatatccatatgtcatatataaagaaagacaaatgtatatgtgccaagtaagaagactggaaggaattatgaacagtggttatctctgtgattgattatgggtgtttgtattctggtttttgttattttcaaaattttccccagcacacagataacattttcttacgtgagaaaaaattttttttaaaaagcagggggtggagagcggcaactgtttgctcaagacttttcagtaaggaaaggaacctggggtagaaagctcccccttcagctgcccatgagggcacaggtggnccccacactcactacggggccagggcagggccacacacctgccact

SEQ ID NO: 406 - DNA, 476 bp, Homo sapiens
  Genbank Accession No. AI276023
  misc_feature (1)..(476): n = a or c or g or t
ttttttttttttttttttctggtttccttctcggnttattctgttagaatgaaatggttcccataaataaggggcatgagcccttcctcacgaccatggtccatgacaaggggcagggcaaagggggcctggatgggagtccttgtgggggaccaggcaggggacttggatcaacaagcaccaaacgagtggcgggggcaggcgagaggctcagtgggacctccaccctcgttgccccagctggtggctgaccaggtggctgtggagggtcaggagctgccccggatcctctccatgtagttgcgaagctcctcagggtccttcagccccatgtcctcacacacccagcggatgtcctcctcgcctgccacaaggatggactgcacagcaggggcccctacaggctcctcaggtgactgggctggaggggctggcgcaaatgtcacaaactctactcgcttccgccgccccccagc

SEQ ID NO: 407 - DNA, 505 bp, Homo sapiens
  Genbank Accession No. AI276259
accatgctatacacaattacgagatacagaactaggcttaatcacactataataagaaaactcacttttgaattgtgatgtttctgttaacggaaggacaatacgttactataatacttttagtgtaataacttttgtttgaattatgaaaaaatttgaatcatttccctctagaccatttcatttcaaacttatactttgtttagtctagccagttgaccaaaaagaaagaaaataaaaggaaaaagatactcggccagatgagatagagagagaatgctaacacaaggttcaatgtatgcagttctcggttgctctgttccatatgcccacacagtgtcatgacgtattggtgtacccctaaacagaacgccagatcagtccattcttactaggctgaagaaaattctctatcagagcatcaatgagtttcttcagttcttcctccagtaaagcagtgtcactctggtcaggtgacgcacacatctctgcataatactttatc

SEQ ID NO: 408 - DNA, 459 bp, Homo sapiens
  Genbank Accession No. AI277612
tttgaacttaaatgcaaaccttgcaatgtgctgagctatgtagtaaaaagtgctatgtttatatatgcatacatatatgggctctggcaagggatgcatgagtacatgcgtgttatgtaaacatagcaattggtcagaaagagagtttctcatcattaggacatttaaggagtggcaagcatattggaagcaagaatgacctagggccatattggcttagttgtcagccaggagtgttgctgttcctacacctggaggggcccaggtctctccccaagcaggccagtgctcacttgatatgacaggtgatcgtgtatctgaggcctatgagtttgagattcccccaaggtgaggtgggtctgcactcacttgctaccaggtagctcccctagttcttgaacacgtgtatggcccagttctgctcctcatgtaaaaagcagaacacgatcttcctgtctc

SEQ ID NO: 409 - DNA, 454 bp, Homo sapiens
  Genbank Accession No. AI278074
ttttttttttcgttcaacagcgtttatttagactctgcactgtgtcagcactgtcctatgcactgaagatacaaggggacaagacaaaggccctgctctcatggagcttccattctgatgagacaggtggtaactgactggaaaacataccaccgctggggcaggtgctaggaagaaaaaggcagcttgctgaggggacagagtggcatcatggatggtcacggaggcctctggaccaggaggcgtgtgcacagagccctgctctccagagctcagtcaggctgcggagctccttcgtaataactccggatgaggcaagagtaggtcactttattctatttcatttttagtaacattcggttcaaattaatttggggttttgagaacagttaattcactaatagaactgtcttaaagccagacatggggctggcaggatgggaaagctctccct

SEQ ID NO: 410 - DNA, 447 bp, Homo sapiens
  Genbank Accession No. AI283643
ttttcagagttaaaaacattgtactatatttaaatgtttgcatataatatattaatgtttttcacactaaaaatatacaatggctatgtataaaacctgattttggaaataatatcaaaaattacacgtgtggtcctttggggatacaaggtccagccaagtggccatcctcccttcccacccatgagtaggcctgccacatatcacaaccctgggaaactctccaggatcacccaggctgggatagatggcctctcatatgctccccataacaccctgttctctgtcactagattactaccttgtgctggcactggctgtaaacattctgccccagcctctgcctgcaccctaactcagtagtgagaggctagagagcctggcgcagagtaggtaggcactcagtaaataattttgatcaatcactgaatgactgactgaggcata

SEQ ID NO: 411 - DNA, 420 bp, Homo sapiens
  Genbank Accession No. AI283888
tagaatgtcataaaatattaaggatactttctttacaaaagctgtgatgacacatatgaagtttctaaacttttaacaggactggaaaaccaatgcagaaatctgctcagtagacaacttaaaatctaaacccaaacatattttgatagatacaatatgcaaaatctaactttacaacaggaatagtactaattccttgtcattaacaccttactagtacattaatacctttacaaacagcatcatataatagcataatatttcatcttactcctccatccaggatcttttgtgagaggcactaataaagaacactagttttggcgacgctgtatcaaacatacacatagtataatggtctattttactatgttcacaaaacatcatttataaagaaatttttatgaattcaaaaatagg

SEQ ID NO: 412 - DNA, 598 bp, Homo sapiens
  Genbank Accession No. AI285531
  misc_feature (1)..(598): n = a or c or g or t
gattttttttcacgtttaatgtaaaaatgatctcgtgacatttacatactaagtattaggcattacataatattaattttgatggctatgttacatcatctaaaaataatatgacaattggtggcatagtatgtgtttttcaaaactgctgtaaaacagaaatagtgtgaactcaaatacatattgctgaagggatgaggatcgctcttaaatgcctggatggcatgaactttacatattagcatggtaagaaattactaaatcttttcttttcctgtattaaaataatgaggatctaagacacattaaatcaaaatatttacaaaaatttaataatgttttagaccaaagaaaaaaaggacaaattaaagaaatcattcttattctaaatttaanttttttaatgttagntctcagttttcttagcttttttttctgttggttctttgaaacaagcattgtaaagactttntaataatacaatagcttttaaactcttagtgaaaatggaaagggtgctttttatagtagcctctggcactcttcattaggctgggtacaaagcaacaagtattctagtatctgaaaaatctcctgt

SEQ ID NO: 413 - DNA, 596 bp, Homo sapiens
  Genbank Accession No. AI285970
  misc_feature (1)..(596): n = a or c or g or t
tttgtggaaactatgaggtcattgttttccagagtctttactataggaaacagctgtggggactacacaaacagagaacactgccttatttagtagcccctcattgtgacgagtgtatagatggggacaggaaaaatccatcaagccacgcacaaatagaacaaaagtagcagagtcaaactaaaaactttaagtcacacaaaggaagacataaaacaactaactcaggaaaagcatctatatgattacagctgttatcttgatttaagagatagttccatgtttagactagatcagttcctttctacatgggtcaccaaaaacttaaatgattcacattgcacagtacctgaaaatggtaacattcaataaatatagcttttaataaaagttttcttgggattcttaggttcaaatactgtatgacccaaccaaaacgaaacttatccacccaccttcagaatggctttccattttatttttccaatcgnaagagtgcctccccaaacaccgtntaaaacctctacgtatttcatctctcctcctatccctctccacaccataagctgcaaacctgcacactgctctacaacatt

SEQ ID NO: 414 - DNA, 464 bp, Homo sapiens
  Genbank Accession No. AI288586
tcacaattccaacttaatgtaatccaatacaacttcatacaaatagcagttaaatcacacgtagtaaaatttcgtacaacatttttttaaagtttcaaattcaaatgttccaaatgtttaattattttgtcttaaggtacatttgcaaagaattctaactgctgctattacctttgtccttgctgaaggaaaacattaggagaatgagctgtttttaagctaaacgtgtctccacttgatgaatggcgtgaaggagcttttccacccaagagtgatgtttctgcttcttttatttccattgcccttttgtataattcagcagctttttcaaaatctcctccttcatagctaagcacagctaaatttttcagtgtttctccaactcgaggatgcatccgacccaggctatcttcataaatctttaatgctctttcatataatggcaaagcttcaacgtgtttttt

SEQ ID NO: 415 - DNA, 635 bp, Homo sapiens
  Genbank Accession No. AI288745
  misc_feature (1)..(635): n = a or c or g or t
gatatggaatttcactactgttgcccaggctagagtataatggtgcgatctgggctcaccgcaacctccaccacctgggttcaagcaattctgcctcagccgctcgagtagctgggattacaggcatgtaccaccacacccggctaattttgtatttttattagagacggggtttctccatgctggtcaggctggcctcaggtgacccacctgcctcggcctcccaaagtgctgggattacaggcgtgagccacacctggcctaaaaatcatttaattttttatgcttgcctagttataaggtcaaagagaatcaaatgactgatgcagtcagcacctaacaacctctgtatatgggaagggggtaatgagaacatactatttggaaataataacagcctaagagccaagtgctgaagttacatttctgcctaccacagctaaagctctcctcactgtctcctacccagtcctcctttccatcaattaccagtctcttgtataaatgtatccattaccaggctcacagactgggagtgattnttctcctttggagctcgtccagaatccatcagcctcacacacatatntaccttgcaatcattggaaaagcaaaaatgtttaactgcatgtata

SEQ ID NO: 416 - DNA, 643 bp, Homo sapiens
  Genbank Accession No. AI290876
tttttcacactgtcttcccgatgagggaaggagcccagccagaaagcactacaatcatggtcaagttcccaactgagtcatcttgtgagtggataatcaggaaaaatgaggaatccaaaagacaaaaatcaaagaacagatggggtctgtgactggatcttctatcattccaattctaaatccgacttgaatattcctggacttacaaaatgccaagggggtgactggaagttgtggatatcagggtataaattatatccgtgagttgggggagggaagaccagaattcccttgaattgtgtattgatgcaatataagcataaaagatcaccttgtattctctttaccttctaaaagccattattatgatgttagaagaagaggaagaaattcaggtacagaaaacatgtttaaatagcctaaatgatggtgcttggtgagtcttggttctaaaggtaccaaacaaggaagccaaagttttcaaactgctgcatactttgacaaggaaaatctatatttgtcttccgatcaacatttatgacctaagtcaggtaatatacctggtttacttctttagcatttttatgcagacagtctgttatgcactgtggtttcagatgtgcaataatttgtacaatggttt

SEQ ID NO: 417 - DNA, 434 bp, Homo sapiens
  Genbank Accession No. AI300876
tttttttataacaaacacttcatttattacttgtgtttatttacactatttacatattgcacaatagctggaatactattttacatttataatacaaacgaccaacagaattagccacagatttacactccactgtctctaaaacatgaccgaaattttaatttttcatgccgttccaaataatactctgagaatttaacagtgaaagtaatacagaatatcaaattatgttatatgaaaatatactttaagattctgcttatgtttctaaagaaatattttttgcgatttcacctaatgaagacaatgaaatattctgtgttttatagcactacacgtcaaatgtggagcattccttttgtgttttttttttaaataagtgacagataacactgtcaagtacactgatttatcgaatatatatctgcaaactg

SEQ ID NO: 418 - DNA, 618 bp, Homo sapiens
  Genbank Accession No. AI301060
ttttcacaatctgaaattcaaagttccctgggtatcctgtattttcatttgcacactttggcgccctagtcccagagtcctggagtggcatactgggggtggctgtgcagtcccagcatccccaacccagcatgtatagagagcatccatccttacatccagctgacccatgcccatgctcctccctgtggctggaggttcaacaataacataagtctcttctttgccctccagatatttctccctcgagtggctgggaaacttggcaagagaccagaggacccaaatgcagacccttcaagtgaggccaaggcaatggctgtgccctatcttctgagaagaaagttcagtaattccctgaaaagtcaaggtaaagatgatgattcttttgatcggaaatcagtgtaccgaggctcgctgacacagagaaaccccaacgcgaggaaaggaatggccagccacaccttcgcgaaacctgtggtggcccaccagtcctaacgggacaggacagagagacagagcagccctgcactgttttccctccaccacagccatcctgtccctcattggctctgtgctttccactgtacacagtcaccgtcccaatgagagacaaga

SEQ ID NO: 419 - DNA, 396 bp, Homo sapiens
  Genbank Accession No. AI302387
  misc_feature (1)..(396): n = a or c or g or t
tttttttgtttgtttgttttttaattaaaaagaaaataagaaaacaaacaacacttcccaggtactcacaaaaacaaggagaaatcccaagagatcacacagagaccccctgtgagggtgggcccaaggcccctcccttgaggccattgttttctcagacaaacatccacctctcctgggctaaaaaaaaggaagcgcttatccaaccttgtttctcttggaagattcagccatctccagctcactggtccatgacatgcacacaggaaactgggctttacaagattttacagatgggcagtgctggggtgggaggatttangggtacacaccactcctctcactgatccctggatctgctcaagggttctggagggctggggagcaatgctgtct

SEQ ID NO: 420 - DNA, 614 bp, Homo sapiens
  Genbank Accession No. AI304339
atcatcataaaaaatatttattataaaaaattatcacatttctctgtacatagcataaagacaaaaacacaatgtatacattaataatttaagtgggcctgagtattcagtatccatctactagaatcctaaagctcttccccagatttcacaaaggccaatgtagattatttctattttatcaaagttcatttgcacagttggtgtaattgagatactaacatttcttttttctagtgttttagagatagttcacagtatttgagttaattaattaatcaactgatttaaatctttggtaaatacaagtatttacatgtaaaaatgtttagctcaaatttcagtaaaaaactgaaatgacaaataacctactgcaaactgttttgtataatcagaaatgcatgagctggactcccaccattaagaaatgtcactgtctaggacttctgatgataaaaactgaaatccacaaaaaaatagttgagcttctattaccattaccagaagcaccacaacactaggccaccatgaaattacacacaaatgtcaaattcaacatataaaccatactgattattttacaatgcagaaaaatcctcctttttttctatatg

SEQ ID NO: 421 - DNA, 498 bp, Homo sapiens
  Genbank Accession No. AI312646
tgtttgtttctttcttgttttgcatcaacttttatcagtccatgcaacttcaatgccctcgatgaaggatgcataaaaagccatacttcttaaaaaaaaaaaaagaaaaaaaaagacttccttctgcataaagagatatatttgccacatcagtccctgtagcacagttttcaaaaccattctgtcaaaaatacagtaatacaagactggctttagtgtcactagcttacactgcttttcatgtatttaggccacctgttgttcctggtactgtatcatgcaataagtcatcaagggcttagtctagtgtaccggtaagctagtggcactgaagcgcttttcacaatctcaacatacatttgaattgcaacacacagatatttctagagtattaactagtgaacccttttattattaaaaaaaaaaaaaaactacttacaaccattgaagaaaaaattgcaacaaaaaatgtaaaaattgaccgtctccaacttgtcc

SEQ ID NO: 422 - DNA, 482 bp, Homo sapiens
  Genbank Accession No. AI333767
tgatattaacaatacaaaatatattttgaaagtcaaacacctgtagttcatagtgcttttttagatttgttaaaaaaaatacaatgcttagtttcctatataggatatacaaaagcaaaaaatatatatgtatatagtagaaataaatcagccatagtaatttacagcttttgtctccaaccctcccctaatcataatctttatcccacacttcagtatatactttctgggatcaaaggatcaatttattctgaaccaggctgagaaatatccattaaattgcattctgtgtagcacccacagagtgccagttggaaatccctgaaggaagacggtgtgggttgttactgttctgggtaaaaagtgagacagtcaaatgacatgtaaatgaatataaatgggcaacctgaaaacctgaaaggatgagggaataagtgttttactatctcaccactcttctgggcatcccctgccctgcaagt

SEQ ID NO: 423 - DNA, 441 bp, Homo sapiens
  Genbank Accession No. AI333987
  misc_feature (1)..(441): n = a or c or g or t
tttcccaggcagggcctgtttattctgagagcgcgcatgcgctatggcttacgaggcaacagcggtgccggtcgatcggtggtcggttcgggggtgcggggcccgggagggaagtgcaaagtcaacagggtgtccacgggggagcccgccaagcagggctgagccagaggccaggcgtccttcccgggtgccgctctcacacacctacgttccccaggcctgggagctgccgcgcggaatgaggggcctgtccagaggccgccctcctcggggacgtggggcctccatcctcaggcccctcggagagcccaggcccccagcagggcacaggcgcacagggtagctgggtggggagcagggtgtggcctatggacccccacaccanggcaggtgggcaggggcagctcctacggccacatcaggcctccctggccttaccca

SEQ ID NO: 424 - DNA, 459 bp, Homo sapiens
  Genbank Accession No. AI338536
ttttgagatggagtctcgctgttgttgcccaggctggagtgcaatggcacaatctctgctcacgacaacctctgcttcccgcagccaggttatctcagaagccaattttccctttagggaaagttacagaatcagccagggaagaggaatgggaggatgggctggatgatccctgttcaggcctaatccgctggcctccctggggcctccctttctttgtgccaagccctgtgctgggtgctgggaactgggaacacagaatgaatcagacatagcctttgttcccatggggctcagtctcatggggaagacaaatgtgtatcaggcattattgacccaggatcatcagtgctccaataaaaagctcagagggtgggttgggaaggcttcctggaggaggaggtactggagggcttgaaggacaagtaaaagttcaagtaaccaagaaggggtatctca

SEQ ID NO: 425 - DNA, 365 bp, Homo sapiens
  Genbank Accession No. AI339240
ttgagacctaagacatcagtgagacacacgagcagacacgggctcggtcgggaaaggcgggagctccaagcggcggggcctgcaggtccaggcggttcgcgggctttctgaccgcattcggccgagttcttctctgaagacccaggacccccggccgagggggcgcattcggcgggctggtggcgtaggattttgtttcgggttcccagggtcccggcaagggagcccttgcggatcccctgagatccacctcagcagccttctccgtggtaggcctcaacttcccgcggcggcccacagccaacgactaatgcctgagcgggagaaaacggcctggccctgtccgggtggttgctgagcaccgt

SEQ ID NO: 426 - DNA, 538 bp, Homo sapiens
  Genbank Accession No. AI341261
agacatttacaggtatttatttgagtaagagctcataaaatatatttttataatatgcacaagaaaaaatacatttgaatgaataaaaaataaaatgacaggaggtgacagaatttagtgtttataaatgaggtcataaagaactttaataattcagagaagaagttcaaagtgtatttaaaagttgagaccctgctttacaatattttataattttaaaaaaaggcgtttaaaggtgataggtgacttaataattttccactttcaaaatgggtttctagacactgttgttcatgaaccaaaaacaaacaaacaaacaaacaacaacaaaacccaaacactttggcaagcaaagtattattagtacatagcagcttcataacagtttacttttttaatataaagatttttcaatttacacttgtaggagtagaaaaaactaatatgctaagtctgtaagctacgcagcaaaaataatgatcttaatgaagccagaattctgtgaaaatgtgcaccacactgcatatatagtagctga

SEQ ID NO: 427 - DNA, 461 bp, Homo sapiens
  Genbank Accession No. AI341602
caggcgtgccactgggcatttattcacacggagcagcgtggtcctcagtgccccgctggccagcaggcacacagggcacggcgctctgcctgcagcagtagggtctccgtccgcgcgtccaggctgcaggctgtcttccgcaggtcctgcagggcgcgctgcatgaactcgaaggcgtggcagtccacgcatgggcggctctgcgcggggacggcactcccggcgggctcggcgcgggcccgggcgcccagcagcgccagactcagcagcagcagcagcagcagcggcggcggcggtgacatcggggaccggcacgcgggcgggggggccatggccagcagagggagcggggccgccctccggttccccgactccagtccgccggtctccgggcccagcgagcctctagtccgcgccccgtatctagaaaacgcccattcggacgcccgcaccaccgccct

SEQ ID NO: 428 - DNA, 480 bp, Homo sapiens
  Genbank Accession No. AI342169
tttttttttttttttttttttgaaggaacaaaagcacaaatttattgaagcaaaagtacattccaaaaagcgggatgaggctcaagcaagtgccctgtgtaaaaaatctggggtttaagtaccctttaaaggtttcctatttggttacaccctatgtaaataaagacttggcctgccaccagtcaaaggctgaagtgaatgctcctttgtctccagaccctattctctggcctcagggggatcctatcactacaaaaatttattttttatttttcttatttttttttttttacaacagtacactgatctacaaaaattttaaaatgagccgggcgcggggactcacccctgtaatcccagcactttgggagacaatgacagaacatcacaaaattagagaaagcccagttagagggaccatctggatgtgtaaaaaaggcagccccaaaaatatgttattggcaataaaaatcctgccac

SEQ ID NO: 429 - DNA, 449 bp, Homo sapiens
  Genbank Accession No. AI344053
acttttttgcccttattgttcttgctttgtcccaagtagatgcaaatgttgtgcaaaccaacttgatcttaagatgttgttgagaacactggagtcacgtgtccatgggtccttcaggctggcttttgatgggagctgggatgcagatgatttacggagggttataatctgtgatgctggtctgaagtctgaatattccaagttgctgactgcaggcagagcctcatgtcctcctggcgctcctgttgccgctgcttgcgctggccctcgggtcgaccctggcccgaagcagcccgcaggcggcgctccctgcaccggagccggccttcctgccttggggcccgatcgcttttcttctgagaattggagtagaacatgatgaaaagcataatcatttggataaagggcagcagggggcagaagaagatgccaatcctgtgagggagaga

SEQ ID NO: 430 - DNA, 578 bp, Homo sapiens
  Genbank Accession No. AI344312
  misc_feature (1)..(578): n = a or c or g or t
aggagacagcattctttaatcatgctggacggcagggcgtggcggggtcaggcaggggcaggatcaggcagggtggtttatagcacaggtcttcctggcacttggtcagaccctgtttccgtcatctggccatggagccacggctccctcggctgtgagcaccagagatcaccccccggggcacctcagccccagagtctgcatgagcaccaatgggcggaggccgcctccctctggggagaagggcaggccacctgggtttggaaggctaggggaacaccaggccaccccaccctggaagaagaaacggaaggcctgaggtccctcctttgctctagctccccagacctgctgagggctctaaagcctgnggcttccgtggcccttctcctgcaggtgtttgtaaaggcagcaccaggccggaggagggctctgagacgaggagctgcccacccgggccttagcaccttgataaagcctggagagtcggngcactgggccggtgagaggggcatgaggggcagagagcacctgnggacagacatcagtgtctgagggcagctggaggccctgnggaa

SEQ ID NO: 431 - DNA, 549 bp, Homo sapiens
  Genbank Accession No. AI346341
tttttttttttttgggtctggaacactttaaaatagttcttaaacaatccatagcctttctatggctccatggtataacataaaagctttaaaaatcttttttgtaccaaatggctgattctcaagaacctttgccatactgagctcctgcctggctcacagcttgaatttcatctctctttcagggtcatgatttctgctattagctggcctctttgtaaatcaacacctttgggaaagatcggaatctaagtaatgacagaaactgtcatttagccgcgaacaagaaaatgggaattcagaaaatgttcggacctccccacattgggggccagctgcccttacattcaaatggagttaggaggaaaacttgagaactgggcgcatgtttctgcttttgagaaactgcccctctttaaggcatgggtatgaagtagccaagtgaaatgctgcaatccataggattctgtgaaaggtcttcatcaagcaataacgtatttagtggctaatgtaaaggatgcagtataaaatattcattatggatatcct

SEQ ID NO: 432 - DNA, 514 bp, Homo sapiens
  Genbank Accession No. AI351043
tataaatctgatttgccatgctaggccaagcttattttattacatacattctgcattctaagaactaataacttcatattgtaaacattaagcatacagagttaaaattcaaggccacattatatcgattgtctcttttgtcgtgtgtctttggctggccgagatcaactcgtagtgtataaatgcataagttatataattattatataaaaagggggaaaaacattgacttgtatacttcattctgacaaacgcacagcgttcgcgactcaaaggaaaactggaggccgcctacccaaaatgcctgcgtgatttctgattgtggcagccaagaaggccatctcttacctgaccctgtggagaacaaagcccccacataatgatgaggtcctgaatgtttctcttaaatatcagacaattccagttaaaattttcatttgacaaacaaagaaagagatgcgcatttttgtttctgaattctactacttcccctttctccattacgctgtgtcct

SEQ ID NO: 433 - DNA, 400 bp, Homo sapiens
  Genbank Accession No. AI351653
tcacttattgagggcctaataatatatattttgactacatttcttatatttcgcgtggagacgttttcagcctctcaaactgcatcgcctacgcacagaagcttcccgaatcttagacgagacacaacaaagctgcgcgctgccctcgccccgcccgcgggcgcggcggcgacaggccctcggccccgcccacaccgcggtgccacgcctccaacccgcctccagccgtgcctccccaggcccttggccccgcccacaccgtctcgccccgccccaagccgcgctgtgctccaggggcgggggcccacggcggccactcactgagccccacgggccgcagcggcagtgacgtagggttggcgcacggatccgttgcggctgcagctctgcagtcgggccg

SEQ ID NO: 434 - DNA, 384 bp, Homo sapiens
  Genbank Accession No. AI352171
tttggagtgatggcagtaattctttgtttaatattaagaagggtgttgcggccaggtgtggtggctcatgcctgtaatcccaacactttgggcagccaaggcaggagaaaaaaaatgtagacaatgagcctttccataaatcagtgatcctcaaagtacagtgtgcagacccccagggccccctgagtcctttcagtggctccatttggtcacaactattttctaaataccactaagatgtcagttgtcctttttgttgtgctgacatctgtgctgatgtgcaaaaccaatggtgggtgaaattgctggcaccttggcaaaaactcttcactgccacaaatttatagtaaaaaacaaaacaaaactggtttcacttaagaatgt

SEQ ID NO: 435 - DNA, 715 bp, Homo sapiens
  Genbank Accession No. AI355848
tgtttttctttatttctttatttcacatacacattagccattcaatggagaagccggagagagtcaggcaaagatggtataacagaagcgcagtgacgggggcggcgcggggcggggcggagagggaacagacgggctggctgcctacttgcattccgctaggacactgaaaacccagaaaacaaaacagacagtaaactacccttgtttcttatgtatctcagtgcagagacggaggtggagggcagagaagagggggagaccaggctgaaggacgaggagcagagggaggcggacgcttaaggtgaagctcaccgatatcaattaaccctatagatagagatacattgatatactgcgaatcttagcctaatatgagaagttgtatgacgctatggcaggcctatgacacacgcgatgctgttgcatgctgttcgtacacttctcccggagggggcgatctggacttgctcatgatgtctcgcgcaggcagctgcgatccatagtgtagcgctgcctttggaagtcattgaacgtaaggcagcagctccagtgtaagcgcccatcgttatagagagcatccaatcatccactgcatttcaggcagtctcagcgctcatcattcctacgaagccatccatgttgggcccatacgcttcatgaataatcttcttcatctctttagctccttttgcagacggcccttcacatgtgc

SEQ ID NO: 436 - DNA, 596 bp, Homo sapiens
  Genbank Accession No. AI357639
  misc_feature (1)..(596): n = a or c or g or t
tttttaagctgtaattttcacaatattttaattctgttctgagatctacaaatatctctacataacaccaaagccagtgatttaataaataagaggaatgtatatatcgctttgcaaaaaaatgcctgatacatttatctctatataagatatttgtagaatcagtttcccaaggctcacgaaactaaagtgcacacacacacacacaccatgtacacacacacactattcaaatcaaatggatttatattaagtgccaaattaaatgctatacaaaatttataaccagatacacaaaatatgaagtcaatcatgaatccactgttgataatggataccatacctcacaagtgtgatttccagttaagaagagggagacaattgcttcattgggtttttagtgtgtgctaatcaccatcaccatcacaagttaatcagtttaattacatggtattcagagattaaacacacatgcagatattaaatggacactacaataaaacctttaaatctgcaaaaagacatgagaacacatggtcaataataccactcgctgccacagcttttcagtagacaatgcanatggcaatcagcgt

SEQ ID NO: 437 - DNA, 620 bp, Homo sapiens
  Genbank Accession No. AI361002
gcacatgaaaagtgtcagtttaatgaagccagcttatcagcagggcgggggagcacacctgccccctcgcaggtgtgcctggctcgggctaaagtgcctgtgcagaacgaggctgcctggcggggttaggagtcggcgccctcgtcctcctcctcgggcaggatctccaggctgctgtcgggctgcggggctgtgtccgtggagggcggcggggtgggcggggcccggttgggcgacagaggcagcggggaggcggtgggcgaggggctgtggggctctgcgggcggggccagccccaggatctcctgcacgttgtggggcagctcggggcaggcggttagctggcggtgcagggcctcggcgcgggtcagcacgttctccacgctcagcttcatagtcagctcgttgatgtgcttgaggatctcattggagccgaagccggacagcatgagggtgtccctctccatgtccaggatggcgcaggccaccagcaggtgcagattggtgccaggtagccctgtccacagcaccttccacagccgaaggactatgcggtagggggagtcctctctgaaccagatgagcagccaccggtaacatgagctaagagagccggattc

SEQ ID NO: 438 - DNA, 416 bp, Homo sapiens
  Genbank Accession No. AI362288
  misc_feature (1)..(416): n = a or c or g or t
taacaccactagagagcaaagcgtctctggagtctgcagcagcaggtctgacgaacgaacaagggaaggagagagcctgcaccgccaccactccctcaggggagcttgcctaaagtttgctactgagcatccggacagaagccactggccagcactgacgttccacgaggagcccagaggatgcgacgatcatctgcccattatttttactctcggaccccccacctccggagtctgggggtccctctgtgtcagtgggaaccgggaggagctcgagcctgagtgctagctgcgtttgcgagatttcagggggtttgagctaagccagaggtggtccacgtcggccctcctccctccccaaccccccgccgcttgttatttttctttgggcggntggttgggcaattatgctctgc

SEQ ID NO: 439 - DNA, 469 bp, Homo sapiens
  Genbank Accession No. AI367020
tgacattaacaactttgtttaatggcctgggagcttgagccggtcagatccctagagcagggtccacacactcagccctggactttctcccacctattccaacccagcctcacactcccataactgcattcctagccttttcttcccgtttaacactgtgcttcacctagtaatcaacataaaaacaaagcagatagaaggacaggcctaggtcaggcaaccgtctggggtaatgcaggtgtcacagccacaggccaggcttgactggcacaggtctggggagcctgggggcagcctgggtgggtgtgaattaacagcctggaggtggtgggagggggcattctgtgtgcctctggggaggggcggaggtgaggtgttctctttgtcagggacccttggatctgctggggacagagcctgcccaactccctcctaagcaacttctgtttcctctgctctcccttcctgc

SEQ ID NO: 440 - DNA, 348 bp, Homo sapiens
  Genbank Accession No. AI367580
gtaactgtaacaatatccatctttattaggagaaatcattatgagaatattatgtcgattttttttcttacagtgaatgctgatttaaaaaaaaaaaaatgtaggggtgtgccttagaaaaccttcctcttgggaaacaaaaccaactagtgattccagcaggtcctacagattctctgtgtaagaagctagggaaaggattccctttctctcatgattgaaccctggtcataccatgtactagttttttcaccctgggaaagtcacttgactttgtaagcctccatttcttcacctgtcaaataggtatattaatgccagattgattcaagtattatcaaaaatatg

SEQ ID NO: 441 - DNA, 446 bp, Homo sapiens
  Genbank Accession No. AI369275
agaacagcagattcagaaaaaaaggttagtattgtagtcccaagttttataaaagacatcaagtaaggccagcaatagaggaatcaagtttctttttcgggttccctggggtgatttcctatcagcttcacgttcatgagctggggatttgcaaaatgtgagatggcctttgactttgtttttgatgcgatcagcagcggcactgtctgcaatccaggcccagcattctcagacagcgtgcagtacggatgcttctggctggcagggaggtcgtggcagtgggctgactagtgtgctgtgttgggagggctcaaagggtgatggggcaagcctacgtgcaaagggagttcctttctggtcgtgccctcctttttggctggagctaggccacagagattggctgccattctcattcctggatggggtggaggcaggtcccagacaac

SEQ ID NO: 442 - DNA, 462 bp, Homo sapiens
  Genbank Accession No. AI369840
aagaaacacaaaagcacagattcctttatttaacatgtatccagcatatactaagctggccactctggcagactcttggggccccaagaagaatacaacctgaatctcacatcaaagcttcaaagaccctggctttctgccccagctgacccctaagctgtagcactcacccaggtgctcctcaatcactgtattgtctgtcagagggatggtcttattcttgaccttggcttgtccacgtttcaaaatgagttctcggacagacttcagatttggaaatccccaggtcacataaggttccactatacgcagcatttttagattctggggggtgacttttacaaagacaccactaaaaattttctttaggcgaagtcttgcaatggttctctgcaccagtaaactcacgccgtcaatcctttcgatgcgtacaacaaaggccaaggaatgtttatctggcaa

SEQ ID NO: 443 - DNA, 990 bp, Homo sapiens
  Genbank Accession No. AI375115
  misc_feature (1)..(990): n = a or c or g or t
tttgattcaacaacagtgtaatctttaacagggatgttattggtaagaagtcaggaagataaaccaaaatgattgagtatgataaagaattttgcatggcgattaaaatagaaaacctataaatgttgaaaaagcaggtctggacttagcaaagaaacaatatagtttggagaaggcatgaaataagttcttttcatgttcactgctggtcacagccataacagagagtgatgtggagagctttgggaaggtttcacgttgagttacatcagtggtcaacaatggagcaacaagactccgtaaaggatgccaccctgggagaattgcaagggaaaggaggctgaagcacaactggtaatagccttcagatatttaatggatatgcaaataaagctctgattaattgtattttcacttattatatatcatctttggacctttcttaaaagtgggacactagaaatagatatacttgaatctcataaaagaatacttcagctcgagttgaatggtatacaagatgttgtgtatggttcagtgagttgcttataccaaagaatgctatagaatttccatgcccgaagaactgtgagaggagtatagattttttcaccaaggaagttactgacatggtttgagagatagtaggaattgattgagacacatctcaagtttctctcactaaaacntgttctgagactctgcgtctttggaaatgagatacttcctatggaagagataacgatcaatttatgaagcttgcaaagactctaggtcaatatctctccattacagccgttttagacattatctatcttattttctcttccttggacattatcatgaatatttataccacataagtacttcgtatatgttatgtcttgtgatccttcgagggtcacacttctctatcttctaggagtttcccaaataacctctgcaaatatggagtggtgcttttcttatanactatgttcatatggaggt

SEQ ID NO: 444 - DNA, 916 bp, Homo sapiens
  Genbank Accession No. AI375913
  misc_feature (1)..(916): n = a or c or g or t
ttttgcaatgtttagaacattttattaaagtacaaaattgttggaatttagctaatagaaaaacatagtaaatatttacaaaaacgttgataacattactcaagtcacacacatataacaatgtagacaggtcttaacaaagtttacaaattgaaattatggagatttcccaaaatgaatctaatagctcattgctgagcatggttatcaatataacatttaagatcttggatcaaatgttgtccccgagtcttctgcaatccagtcctcttagaaattggtttctctctttgggagattcagactcagaggcagccagaggggacaggtcaagagctgaaataatcacataactactctaattttcttcattctattgactgtgtcaagttatagacacagccaaagtgtttttcttcggcctctgatgatttgagaagatgaagaacatgagcantttctcattgcttaaagaaaaacttggcacataagaggctgagtgtagtagagtatctgtactagaaccataaagttctatctgatggtaaattatgtataaaactaagataaaacagataattatgctctatctcatatctactgaaagtagaaaagggaggaagagtgacacttttaaaatcanaactgctctagtttttagcttagtggatgggtaataaacacactgcctttacgctgagtgatcagatagctatttctacagttcagaagaacttaaaaatcaggtttttaggacaaaaggaagcngacttcaaacacagacaaaggagagagaaaacaatgcccatgggatggcacttttttgacagaatataaaaaagctaagacaccttgggctttcttttctttgttgtgtgtgcctaaaacaccttccccaactaaattcaagggggga

SEQ ID NO: 445 - DNA, 492 bp, Homo sapiens
  Genbank Accession No. AI376944
tttttttataacctcaaagtcagcactcccagttgggtgttttattatttatttacttgacaggtaacatcgatttggtcctacaagacaccatgctataggcttagctacttgctgttgcacaagagaactttcctgaactctcaggaagcccttgcatggcctatcgaggacagctcagtcactgaagggaaaaattccataccaaagaagagagaaaaattccataccaaagaacagacttcccccagggaacctccgtcctacagcccttcagggccatcacactcacacacatcagccatcatcaaaatagtggccatgctgggaagaacaggagtcctgaactagaaggtggtcttcaaaccatggcgtaccgatttatgtatattacagatagataaattaagaggtctacatgaataaaaaatctctcaaaggggaacgaattccattctgtcatgccaggtgtttgtcagaaccttgaaaacg

SEQ ID NO: 446 - DNA, 604 bp, Homo sapiens
  Genbank Accession No. AI377937
  misc_feature (1)..(604): n = a or c or g or t
tttggtttagcaaaattgttataatttcttttaaataacccacagacacccatgacacttccaaatttacagagcaaaaaagtgatttgcagctggttcctccagggaattggccccgaaggctggctcagttcacctccaggacctcagtctccgggaggccgaacttggtcttgtgcttgtcgaagagcttcaccagggcctccatgtacatggtgtggtacaggtcgatgtcttgctgggttgggtgctccagcttggggatggtgatgggctctcccacaacagtggtgatgggcttggagtagggcaccagcccccaggtgtcggaggagaagaggcctcgaccatggaagatgcatggggcgaaaccaatgtatttctggaacttcttctggacccatcggccccaggagccctcctcgaagatcacctgcttgtacacttcattctcttcaaaggagtagattggaaccaggtcagctccatgacgcagggccagtttcacaaagcccttgcggttccgcagggtgactgcattcttgccaggcatggagctcagagactcagccgcacccncgaccacgatgatgatagcattgcc

SEQ ID NO: 447 - DNA, 540 bp, Homo sapiens
  Genbank Accession No. AI378584
atgttctggttgaaatcacctgtgtgtcttaatttctcaattcctttttggcaagaatatcaagcaaggtgaatttaacattatgtttatgttttgttttgttgctgtaactaatagttaattggactgattcttacccagccctggtcaagaatctgtgaggcatgtgactgaagtactaaattaaacttattttgaaaccaaacctaatttttaagccaaaaggtgtaatagtgatttaatacaggatgaaaaacactgaatttttaagactgtaggtggactatgttagtagttttcaagcaggatgtctgtattcagcattcaataatgctaaaatccctttcagcatgaaatttgtatgtttttatcctttgctgactaaaataaaataactggtggtttgctaactatttaccatatgggttggctggtttttattaataattgtttagggtatcataagatctgtaagtacaaaggatattctgtttctatctgcaatgcatttgataatcatttctatgaaatgtattttat

SEQ ID NO: 448 - DNA, 558 bp, Homo sapiens
  Genbank Accession No. AI379723
tttttttttttttttgattttattttcattttttattgaaagcttcatcaaagaaaacagaagtttaaacctaacatccactgatctacagaaagcccaagggatgggggagatggttgctaatttgactgtggtacaaatgaagaaattaaaaataaaaccagaaacaccttagaattacagaactttccatgacagtcagagacagcagtacaaaaatgctcttaaataaagttcaaaattgaatgatgtttcagaagttccatgaagttgaatatggactgaaacaagggttttaaaagaagctgtgtcccttttttttttttatagagactgaatatctcatagcagatactactacatatatttttttaaattaagattccatttttcttcttcttcttttgaaataaatggaagcatttgtgtccagaatagagaaaactttttcaaatatctttttgaaataatttttacagttcctgaaaagcatggaataacttatttttttatatatgaagagataacatatttgagggaggaggaaaaaacatcttt

SEQ ID NO: 449 - DNA, 628 bp, Homo sapiens
  Genbank Accession No. AI379892
  misc_feature (1)..(628): n = a or c or g or t
tttcagaccagctagatatttttattaatgatatataacctctttaaaacatgtatatttaccaaaagcattctgatatggcattcctctagtgtgactttttgcatgtaaattaatacagcctttttgaccttccatacagtcaggttcctcttcagtgtggatgtttcctaacgaccaagttcaagggctttccaacatctctttcactcatgggacttctcaatgtgtgctttgacatgttcccaaagtggaagctaaaaacaaagaagaatctccacacattttacattcataagatttttcacacttgtgagatcacagctgaatattaaggtataaggcagagtgaaaggtttcaacacattccttacagccagaggacgtgcatttatatccaatgtgctcacaagctcagtaaggcccgaggaaaataatgaaagctttttcacctttctcacantcatagcatttctcttcagcatgagttcaaacagactcagtaagatgtaagcatcgacagggttcctacgttcagtttgtttcctaggatgcacagacacatgaatagtaaggcctatggaaggagccaagatttnccacattccctacattcatatgtcttctc

SEQ ID NO: 450 - DNA, 478 bp, Homo sapiens
  Genbank Accession No. AI380204
ataaaatctctccccagaccatcatcacttttaatcctccccagaaggggcttcatcttcagacccttcatccccagatttctcgggtggggggcttgtagatgttttcttttctggcgggctttccggttcctcatcttcttctttgggagaaggagtcttttcctttgatgcctttgaagctgtggggcgacccactttccctttgcctttcactggacttggcgtcactgtagcctttagtctgggtttgggcattttcttttcttttctttcaggtttggacttcttaaccatctttttgtttttctttttcgaactgccatagtcactatcgtcatcatcttccattaggaaatcttcatcgctgccggaatctttctcctggaatggtgcctcatcctcctcttcttgttcttcctcactgcccacatcttccatgagcatctctctctgtttagaagctgctttagatgcc

SEQ ID NO: 451 - DNA, 314 bp, Homo sapiens
  Genbank Accession No. AI380583
cagtttaaaaaatgtatttttattggtacatagtaattttacatattcatggggtagatatgatatttcaatatatgcatacaatgtgtaatgatcaaatcagggtatttagaatatgacatccaacatgtatcatttctttgtgttataatcttcatatgcaataatcaataatcataaacaggatttctagttctcaaacgggcatggaatcattacaaaatgttattagttgtaataggtgaggcttctaatgaatgaggaatttcctaatctctctcaaccacagattattatgaaatggagtacaggct

SEQ ID NO: 452 - DNA, 473 bp, Homo sapiens
  Genbank Accession No. AI380932
actcttatgttatgaatatttatttttttctccttaaaaatgtacaaaaaataaaataactgtatttatagtttatagattccccctctcccatttacaaaactattaagttacatttaccttttttttttaaaacatgagagcaaattgtacatatatcaatctcccttgcttgtctttaagaaagggccgttcatagcatttggcacaaaccctctatttctgttgcatttgcatgattttaaataagaaggaaaataaacatttgatttatttcatgcttcctaagtttctgggcagggacatgccttactcttttagaaaccaattccaagatgacatctgactgcatttttctgttggtccgaacttctaaacaaacactcataaagtaagtttaaacaatttggagatgtatgaggaaaaaagtcttgtctgttcagttcagactttgtaaaaaaaaaaaaaagaaa

SEQ ID NO: 453 - DNA, 479 bp, Homo sapiens
  Genbank Accession No. AI380979
tttttttttattggtacagaaccattaaatacaacttatacacaagcaagctgggcggcgtccggggggcagggagagtgcaagagggtcaggggtgagcagtccgggcccggtcctggagggggctgaggctgccgtcgtgggaggggcttggctggcggaggccgggctgcctgtggaggccttgaagctttgccagcagctcctggatgaagtcctcgacaggtttcccacatgacttcaggagtccctggattttccggcttctctcctcttcactctctaactccaacaattcatcaatgttgatctcatcgggcatgtctgcctccatgccgggtacagcttctccaggcgccccgtgatccacttttccacgtccaagccgcgttgcagcttccgccgtcatactttgagtgacgcccgcgtgccgcttctgcagcccccgggactgcccctggcccgggggcccgcgatga

SEQ ID NO: 454 - DNA, 278 bp, Homo sapiens
  Genbank Accession No. AI381686
ttttttttggtgaatgagaccagtgatttttaaactttttttagccacagaccttttgttcaaaggaaaccttaaatggagatgtaacacgccagctgcttaaagacacaggctctgcaagagtgagtgtgggagtgggaggggggctaccagtctcgccagctgggccccctcgctgcttctgcccagctctccctgctgcagcactggcactgcagggaaccttcccagccacggggggctgagcctggggcctgtcaagccctgactggacatct

SEQ ID NO: 455 - DNA, 544 bp, Homo sapiens
  Genbank Accession No. AI381790
  misc_feature (1)..(544): n = a or c or g or t
gtgggaacgtgaattttaatgagggggcagaccgaggaggtggtggctgcccggagatcagggccaggctgtgctagatggcgcctggaaggggggtcacccaagtctccctgctgtcatttcaggaggccgacccaagtctccctgctgtcatttcaggaggccgaattttttcccaatcccaagaaggtgtcagaggcctggttagcagtcttgtcgatggtttcctggggtggtcttggccagctggtccatggctttctgccccgccctctgtggccctggtccaccacttgctgagctgccgctccggccgctgacacgcttcggggggcggtccctcaacctgttgcttttcaggtcctgcaagcccttgcttgcatgcttnnnnnggtaattgnnngggaaagtcgtcagagcactgagnncacgnntnttggatcttggccncaagngggggcgatgccaagcgccagctcccccctcggggcccgaattcttggccctcgaggccaatccccattaaanngaggaggcgtattta

SEQ ID NO: 456 - DNA, 639 bp, Homo sapiens
  Genbank Accession No. AI381930
  misc_feature (1)..(639): n = a or c or g or t
tttacttttttgtaaatatcaccacttcattcttcctttacacagctttaaaaacatcataaattaaaacatggagtcttatttatagtgtcccttgtatagagctttacggtttataaaagacaaatgattgcagaattaagcttaaaaaaaaaaaagaaaaagaaaaagtggatttgcttttgtcaatacagaataaatatatcccccaaatacttgggaggtacaactttaaccaacaccctgcacttgcagatccctcttccaatttcagtatttgcaaggtcggtgattttgtttgtttaaaaatctgcaggtattgtgattcctcttaaaaaggcctgagttaaaagttccactctgggacttgtatcagattactctctgtagcagaatccaacctcttcattaatacaattcttcaaggcaattctttcacataggaggaacaatcatgccagatatcgcttgcaggctgttcccgttggtgctggtgcangtgggaggtgcggaggtctggngtctgacgactggtgcgaaagcactcttctgtatcacggctgagacccatgttgctggtgagaaagagaagatgcccgacgagctgctgcagttggaggggaggcttgtgatggagcc

SEQ ID NO: 457 - DNA, 418 bp, Homo sapiens
  Genbank Accession No. AI382415
  misc_feature (1)..(418): n = a or c or g or t
tttccatttgcagcaatatattttagttggcttgttgaaacacatctctcttcctgaaagcaagcaattcttgaagtggatcaaccttgtcatcatatcccttttattcttcacccttttattcttcactggtatgacagtccctataccatcttagccactgcttttttgtttctacttattttccatcccccctgcctgccccccatagcaaaatgaaggcatgccgggaagcagcaactcaacataaaaagaggaccctcaagncgatcagctcacagacagttttttgaatttagttgcatgcagagcaatttctgttcttcccatagcagcaanncnaagtgntaggtgcccnaggatccaagcggcgagaggctggcccnggagttgggggcttggaggctgggccnctggt

SEQ ID NO: 458 - DNA, 474 bp, Homo sapiens
  Genbank Accession No. AI393356
ttttttttttttttttcaggatttatttgaagatgtaaagtcatcagtaataggactgaacgtctttttaatatcaacagagtaaattcattatgaataattacactttgaccctaaaatattctcaagtgctcagttacctcaatgtacttaaataccaaaaaaactgcctgtgctgaaatatgtactggctaggcttatctgaagggctaagggtgactaaattcacatccaaagttaaatcacaatgtagtaaataacaggtttctacttcttgctgaattctgtgagaattcaaagagaatgcttgcggttacaaactgctgtgtgaggttgaaatcgtcagccactacacttcgtgggcgctcctttaaaaaccacagcaaaacacaaggatgcaaacagatggctttgaaagaaattcgcgtgaggggaagcaggagaccaaggaggaatgagcctgcagaggggacg

SEQ ID NO: 459 - DNA, 434 bp, Homo sapiens
  Genbank Accession No. AI394013
  misc_feature (1)..(434): n = a or c or g or t
tttttattgaaagcctgattttatccgaccttttcgttttaaatcagaccacagagggcaagaggggagaaggaagcctggaaacgaaagggaggtttcggtgtccgcaggactcggcccagttggctgacttgggtccataaaggccgaagccttgcgggcagtatccgcatcctccttggccggggcagaggggcagtgcgtcctgccagaacctcctggacgcgcatcgggcaaaaccggagcaggaatgagccggtggcgagggcacccggccctcccttggcgaagtgcgttccttcccgcgatccccgaaatcgctccctgctcgggctgttggactgggcaggttctactttaaacaccagctctgttggccccttcagtcgcttgagtctagacagacggcggcggcggnggccctggtcttttct

SEQ ID NO: 460 - DNA, 590 bp, Homo sapiens
  Genbank Accession No. AI394248
  misc_feature (1)..(590): n = a or c or g or t
ncctgtttttnaaaacttntncttnaaaaaaaagaagaaattagagaagggaggtaggggggacaggagagtgaaggaatctctccaaaatgtcggatccgggcgaccctccttccctgatgcccagccaccccgtcccttctctgtcctggcggcgaggccctagccgccatcttctggggaccaaggcccaggagcccagctcgggtcccaggcagaggtgaaggcagaagtggggctcagggcctggaggccttgccggtgtccttgagagcccttggatgggcactcaggcccccatgtcccagcagggccctagggaggtaggcattgagcagaggggcctttggaggtggggtcctgaagctggaggaccaggcgggaaccagaggcaggtgtgaggctgggggtcacagccggaggctgggtctctcctgcatcagcctctatagataatgccattctccttccaagttcaaactcatccccactgatcccggaggcccgacggncacgtgtggctgcgtctcggtatagcccccgatgggcttgccctcttggctgaaagcttcccccttccctgtgcgttt

SEQ ID NO: 461 - DNA, 367 bp, Homo sapiens
  Genbank Accession No. AI401832
gtgagttttccttagttttatattttacaaagtcagtacagcatttgcaacacttctaacacagatcagaaaactataagcttttaccttattataaaattattcagcatgtaagttaaaaggagaaccacatgatcactgaatcccatgtcttagatggttctggggttctaaggtcttgagagccatcaagtagcctattccagggtttccatccagcaatccccaccccccctacatttacccctgcttccaggagaagttctcatctccaaacaagaaggtcgcagactgtgggcctcgaagctgcacctgtgtgaacctctgagctcagctgccagcctcctataagtctctggctcgtgcc

SEQ ID NO: 462 - DNA, 669 bp, Homo sapiens
  Genbank Accession No. AI417267
  misc_feature (1)..(669): n = a or c or g or t
ccaagggctggaactttattattgtcacagagcacaggagagaccgcttgggtctcaatgaaggtttgcttttcctcttctccaggggaagctactgcaagaaggcccaccagccaggctaggtcaaatggggttggggccacaacatgatagttaaacccataaacacagacttgattcgatcccagcttcacgacttcttagctgtgtgaccttaggtaagtctgttaacctctctcagccttggctttgtggagtggagtgaagagcagggcctgcttcactggggtgttatcaggatggagggggacaaggcctatgaaagtgtttagcacagcgcctggcagatcgtgaccagtcacggagtggaagctatcatgatcaaatctgatttctccacggtcaggccagccctgtcactacggatgaggaagagggggtctcatttcataaatgccttcaatgcggcctgtgagaaagacagcttgggacacctgtgtgagctgcctagtctcttgcaatgtggagtcggacccaaacatgagggttctgggccttggcacttactaccatttctacatctncatgaaaagccctagccagagtacgggngaagttctaatttttttttttttgagacagagttcgctttgtccccacggctgagtg

SEQ ID NO: 463 - DNA, 662 bp, Homo sapiens
  Genbank Accession No. AI417917
  misc_feature (1)..(662): n = a or c or g or t
gggaagaagccttggctttattcgctctgtggggacactgttccgttcagaggcccctcccagccatggggtgggggacagtggtgggcgtgggaatcccagcgagcatcctggagggtgcgtcgtctccatgtattttgctcttccccatcttttccatggggtcccctgccagggtcaagcactaatatgtggtgaaggcagcaaacagcgtcggcgtccctttaggggtggggagagggctgtagcaccaagaacccnctcccccgccacgacatccctgaaaaggagactaaaataaagccccggggcctttctacgtaggggctccacttaaatatggaatggtggtaggcagagaggcggtggcccagcaatccttaagtccagattaccagctgtggggaggcttccagggggccaggagcaggcttggcagttccagccacagacacgtgggtgaggacggaaatatctccaagggggcacagtatcagaggagcaggatggaagggcttttctgcctgctacggatccttttaaagaaatggtgtgaagccggccggngctcatgcctgaatcccatcactttggaggccgagcgagcagatcacctgaattgcgagtcgagaccagctgccaacatgtganacccgctctct

SEQ ID NO: 464 - DNA, 472 bp, Homo sapiens
  Genbank Accession No. AI418405
tttggggtgagaacatttgaaatttattggcttagcaatttggaaatagacaatacttcattggtaactacagtcaccatgctgtgctgtagatctcaacaaaatatattcttcctgtctcaactaaaacgttgtactctttgacaacatttccccattcctctcaccccctccaaaaacacccattctttatgttgaagagaatggctaaaaagtcccagcaggtttcaactgacggcttcagtggttgtcccatcacacttcaatgttattaataaaaaggggaggggcaatacataattcggacaggctgaaagtaccattgtaaccactttcttgacttcacagaaaaagtcctcttgttttcatctgtaaaatgggaactgcgtgaataccattcttcttttcttcagccggaaagagtgctgttttggaggaggctggggcaagtgtggatggctcgagtgggtcc

SEQ ID NO: 465 - DNA, 524 bp, Homo sapiens
  Genbank Accession No. AI418481
ttttttttttttttgttcttggaaaactttatttcagtttagacaacaaagcaaatgatatttatgtcatccagggacagataggagagtacagtcattcttcatagcagtttcattgccaaactccaaatgagagatgtaatctaggtaaaagacacttattattccagattacatttacctcacaatctgagatcatgaaaattagtcaaatatattagaaacagatgtacacgaagtcacctcagataaactgagaaagtgatgtctaatgctttggaaaattctgtttctacttaatactcagattaatgagttttaaagatcaggaacatctttatgggggttcataaatgttaggaacaatgatatgcactttcatcagtttaattattaggattcaagatggtatttaaaatctagatgtaggctcagttagtcagtgccaaaaatggaaatcttacatttttttagaggaaacacaaaaatatgactatttggatcttgtcttaatttacaactgg

SEQ ID NO: 466 - DNA, 431 bp, Homo sapiens
  Genbank Accession No. AI418596
ttttttttttcatgaaaaattctaatttcattcatgttgctacaagtatagcttcatgctttaaaaaaaaatgcgggctggtaacatttttctatcttacttacagtgtagagttaaacaggtgcccttacctctcctccagtgcatggaaaaggactggagtatttagaagtacaaatagcgcccttcttgacaacatcatcttccaggccaaatgtagcggagcagttagtcgcaaagtacttataaggcttccatgttttcccaaagtcctgggagcggtccagcaccatggcagccggcctgggggacttgaacatcacaattaggtgagtgaagtagaattcagcttccaggtctaactggatcttttctctgtgcacatcctccgcagactgccaccatgtgcgaggaaaccggaaggatagtct

SEQ ID NO: 467 - DNA, 473 bp, Homo sapiens
  Genbank Accession No. AI419030
  misc_feature (1)..(473): n = a or c or g or t
ataccattttgagagtaattttaaagtttaatgcgagagntcgggagcacattgtatatttgaaataagtgtagtgtgtgcaaagaccattttctacctgtggataaaaatcaattcccccaaaggcctaaaagcatgaacaatgtttattttgagtaaataattaaactacatatttaacatggaaaaaattaaatgaatgtcaaaaccaaaattaagaactataagcaaagcatgcagtctctgttaacaaaacttagttgtgaaactacatttttcattttgtaaatgccattatttcatttcataaaatgtaaaaatcctcagtatcattctttacacttgatgcggcaaacacttctttcctattttcctcgtatttcctgcanaataaatctacatctcaagttccttatagttcatactttcttctcaacatatttgagaccttcaggtccaggcctattttctct

SEQ ID NO: 468 - DNA, 573 bp, Homo sapiens
  Genbank Accession No. AI421837
cagtttttatttcaataaaacaagaggcaacacttgttgtataacaagtactacatatggagaacatttacacaaatatacaaaaattcaaaaaactaaactccagtttatttccatagccttaagaaggtagggaacacacaaaaatagccaaagtcgtcgtttattctttaggaatgtaaactctaggaatacaattagaaacaaatatatttactatgaaaagattagtatcactaaatgattagaaataaaggtaagaggtacacaattaagttccatataagagaaagccacaattcgtgaaataaaatcttgggtttatggtaaaaaccttcctatttaagacaaatgtactctaaaactctacttataaaaaaacacaaaaacatctcccaaaatgttcgttgttagtttctttagatatgcacaagttacaaagtttagaagacaatatatttatgctctctgatgaagaatttaacaatattaaacataaatctgaataactcaaagtactgagtataattttactaagcaacaaatgtagaagtataattcatgctcattaaa

SEQ ID NO: 469 - DNA, 442 bp, Homo sapiens
  Genbank Accession No. AI431799
tcccctagaaaactcaacctacctctattcagaacgctggtttcaagatatcagagataacacccattttggtttttttaccttgctaaaaagatgagggcgctgtgacttagaacaagcaagtcgaaagccaaatgcaggtgggctgatggtaccgcaaccaagttgagcgttctaccactgccattgccccaggggccccacctggccatgccgggggagtggacatgctgtagggagaagcatccctcgctcggcgtgggccaggggctcgctgcaaggccaagggagccagcatgaccggccgagcgctgccctctgctctgcctggactctcagagacgtccaggaggtagggagctgggcgctcaggggtggccgggccacagtgacaccggccaggatgggggcgggccctccccaaggacacagtgcgaggctg

SEQ ID NO: 470 - DNA, 475 bp, Homo sapiens
  Genbank Accession No. AI435443
  misc_feature (1)..(475): n = a or c or g or t
ttttttaataaaaacaatggtcctgccattttttatttatcatagcaatacatacttacagaagaaaaagaatcacacattttaaattctgatcattacactatttttttgtagttgaataataaaagaatgaatctcttagtgactttttaaaataccttcaatgttggaaaaatgcaaattatgatatgataaacattcaataactggagtaagttcacttccaaatgaaagacacttggcacccagtaacagtaatgaaattaaacatcactgaagacagntaggaggtctgcctggaggtctctaaggaggtctgcctggaaccatatctttagtgtagattcacaatcaatccaatctttcaacctacattttaataatttagctttagaagaataacatgtgaatcagtttttctctaataaggccctgaaaaagttgtatcctgaagcactataaagagagtgaaact

SEQ ID NO: 471 - DNA, 522 bp, Homo sapiens
  Genbank Accession No. AI435828
tgccatttatttaaaacttttattaacgcttgaagaaaaataatgcaatgtgacaatgtacaggtcctgttgcctaaatccgtagtagaaacagatattatcacttagcaagctcacgtggtgccaattctgagatcagacggggttgttcctccttaggaagtggccactggaagcattgtttttccatgctatttccgtgaagccttttgcttggttcgagtttaaatttctccctttgtgtgagtatgactatagttctggcctggtgttttctatttatttagttttagatgtcagcattttactatacttggtcctctcacttcagaataacagggctatttattgatacaaaggagaggtgttcagatcatcttgttaagatgcagagctcaaaataaacactaaatctttatttggagatccacatccttcctcaaaggaaggctcatgagtaaatttgtatgcagtataaagcccaagtagagggtgtatttttaatgactactttgcttacat

SEQ ID NO: 472 - DNA, 435 bp, Homo sapiens
  Genbank Accession No. AI436297
tttagcaatatatttatttctttttggctttactgaggtataattgacaaatattatatacatttaaggtgtataatgtgatgttttgatatacacatatattgtgattaccaccgtcaagctaattaacacatctccatcatcttacagttactttttttggtgatgacttaagatctactctcttagcaaattttaagcatacaatccagtattattaactatggtcaccatggtgtacatgagctctctagaacataatatgagccggcacaaagttgcagttatacaggatgaaaagcaacatatttcttaggccaacggcccaggggtttatcccaggtcatgatgtgtacagcagtggggtaatcggatgctttgcctggctcagtacagctgagccttcccacagtgtatgctctcctattcattgat

SEQ ID NO: 473 - DNA, 393 bp, Homo sapiens
  Genbank Accession No. AI436670
tttttatttttttattttttgcccccctttgcaaagccacaccagccagttattctgcagccagaataaaaccctatggtctggctaacccgggctttagagaactgactttccgatttggcagaataagagatgccttcaatacatctaggctatcactctgagatgctgcctttgcaaaccccctttctctccctccccaccccccaaaaaaggaaaggaaaagaaagaaaagacgggaaaaaagacttattgggggtggaagtggtgccctctcttcctggaaagcttagtgcctttgctatgcaaataacatgtgcagagcatcaaaaggtatcaggagaaaagaagacaagaggagcaggaagggcagcaaagttttgttgaagtagc

SEQ ID NO: 474 - DNA, 482 bp, Homo sapiens
  Genbank Accession No. AI439628
tttttatagctctaatgctgaaagagcagctttttaatgtaacagatgatctaggtacacaagtcataggtttctcttcctaggataaaaacgttcaacaaaatacaaactaaacagcatcccagaggcaataaaatctcattgtactgaaacatatacaaattaaggctaccttgatatataaatgatttagaaattatgatggaacattcccataaaattatttaaatataagaattcaatttgtcaaagaatcagtagtgggcctcagttcaaacaaattaatattaccatcgttacattcaacttaatacacttagccgctataaggaaagtaactgtaacgtcacttcctgaaataccactagtaatgttaagaatccaaacctgtcaaaggggaaggtattacagcatttgcctcatgaatgaaaaagtccaagaatttcaacttaatttttctaactagaacaagatccaaacat

SEQ ID NO: 475 - DNA, 458 bp, Homo sapiens
  Genbank Accession No. AI446030
tttaaaaggcaatgaatgtttttatttgttaatccacattagcagcaacaccagaaaaatcattaaccaccccacctagcattgaaactgactccacttatcgcttcttctttttaaattataatgtaaaaatgaattgcaaaatatattttatttgaacttactgaagtcaaaatcataggaaccagatatttaaataaagtttaaatctaaagtttatattttaaacataaaatttaaatcgtttgttttgaaaagtatatccttgaaaagtattttgatatagatgggaagattttcatagactggcatctatttttccacctactgtttaatgaagtaaactgttgaatgatgtaaactgttaaatgaagtaaacagttaaaactgatgacataaaagacaagcaaagcgaaggaaacatgttataaaagataagtattacagcattcttaagt

SEQ ID NO: 476 - DNA, 435 bp, Homo sapiens
  Genbank Accession No. AI446168
tttttttttgagacggagtcttgctctgtcatccaggctggagtgcagtggcgctatcttggctctgtaacctctgccttcagggttcaagcaatcctcctgcctcagcctcttgagtagctggaattacaagtgtacgccaccatgcctggctaatttttgtatttttagtggagacggggtttcaccatgttggccaggctgttctcgaactcctgacctcgtgatccacccacattgtcctcccaagtgctgggaatacaggcgtgagccactgtgccatgaggattagtaaagtgcactcatgttaagtaaaaaatttgttttatgtttatgctgattatatgaaggtcatcatagcttagacacaatcaaaacccatggggaacatctttagaattcatttttctcttttcttacaaaaaaagtaaatag

SEQ ID NO: 477 - DNA, 531 bp, Homo sapiens
  Genbank Accession No. AI458003
ttttttttttttgggttataataggttctttcactttattgcttattgtaaacactttggccatagcaaatgttagtttttaaataaccgtaattcaaaactttcacatcctatactatttttccccaagaagcatcatctatgaaaacaatcagtgaactccaacagtctatactggtaatgtgcacattgatgctattatgacacttaatacaaatagtaaaaatactcatctattgtaggcttatgggtttgtaaaatgccttaagggaggccataaacaactcaaagaagagatggtgtggactgaactggcttctatttggggaaaatttgcagaatataggaggtacgcaataaatgtttattgatggtgaagatgagaaaaccctatttctgctgatctttcctttccgttttccttaaagaatataaggtatatttgtattcagcattctcagaatcatcacagaaaccctggcactttgagagtcttagccacagtgtaattgggtctgaccacacgcagaa

SEQ ID NO: 478 - DNA, 585 bp, Homo sapiens
  Genbank Accession No. AI458306
cattttactacatgaacatcatggataacaagggattctgattcattattaatttcattaattatattttctgatatgagtctagaacttactgcaaaaacaagacaaaactaaaaaaatacaactgagaagggtgaagagaagtatgtttgttaaacagtaaaaatgaatagtatacttcttaactaggtttacaactggtggaccacacaccaggcactaatcacctggtgaggatttggcatatccaccaaaaaatgcatccgatttaaccaacatctccaccagcgctacggactcctcccaattctgacatctcttgcagacaatactatgctctctacacactgtttagaaatggaaaggtgatctgcactgtatcttgggtttgttggctatgcttcctttgatgacatatattatacagtatatatatacatatattttttttgttagagttctagccattttatttctccgcagggtcctttctcagacattactgcatgctgtatatggcgttagctgtgtgttgatcttctaaaagatgatagagtttactggtaattgtgtaatcagctcctg

SEQ ID NO: 479 - DNA, 485 bp, Homo sapiens
  Genbank Accession No. AI458858
  misc_feature (1)..(485): n = a or c or g or t
ctgcttgtcctgcctctgaagctccacaacacgaactgttgagccactcatttggtgctaaccagagaaccttgctgttgggcgagacctcaggatcttgttcaaggcagggcttggcccagcagcacttctggggggtgatcctcaccctgctggaacaccttgagagcgcgttgctcaaaggcgcctctaagagttacagggttcttctctctcccgaactggaatctgtccccttgaaacttctgcccatggatcccagttctgctctctggaatgaagcaatcttacataaactgtctggggttgctggttgatgtttctggttcgtaagttgtctacttctgtggtcacccttgggcggagcttggtggctcatacttcaccgaagttcagggacacttgtgcaccgaatggtaggggcagctggaagctccatcactggggagtgcctagctntacatgcagcactccagactactctg

SEQ ID NO: 480 - DNA, 519 bp, Homo sapiens
  Genbank Accession No. AI459139
ttttttttttttgtcccatagcatttattgtgactcgtggctttgtgggttagaaattctggcagggcttggatgggcagttctgttcctcacagcatcaagtgaagttggtgaagccttggccagaagctccgtggtctggtgccttgggtgggggtggctgggaggctgggctcagccaggactcttgactggggcatccacaggtgggtctccagcatgacgtctcagggtggttggactccatgcgtgatggctgagggccccagagctgacccttcaaaagactgaactggaagctgcctgtctcctaaggcctgggcttggaaactgcatggtgtcatttctgccatattttattagtcatgtagtcacagagtccatcttgcaggacggagtcttggccgcagactgagcctgtacctcacccgtctcccaccaactcttggtactggatgcagccatgctgggcagctctatggaggcctggcgggctagctttgggtctggccagcagtc

SEQ ID NO: 481 - DNA, 499 bp, Homo sapiens
  Genbank Accession No. AI459140
ttttttttttatggcagagtagaatttattgggaaaaaggaaagctctcagcaaagacaggggtcttgaaagcaggttgccagtaaggcgtctgtgttctgtgtcttttatgtggcagaagctgggaagtcttctgtgggttttgcccagatgagagaagtaacattttcttcttggggtactacagctgtgcatgcctaagttttgccaaagggactccatcttggttattacccatgagtgcctaagcaaaacccatgggggtgctaaaaccacaatgctaatgtcatgtttaatgacattataatgagctgggttaaattagggacatttaggctgatttattgtgcccgcaccaaagttgggatggtcacttctgagcaacatcctagcttaagggtaacttcttccgtttttcctattaactgtagaggcagtataggcactgtcttgccgttgttcttgtgaacatagttcctttctatcccttctcctgaga

SEQ ID NO: 482 - DNA, 359 bp, Homo sapiens
  Genbank Accession No. AI468491
tcttcattgcatgtggggtctctgcaagtgtgtttcctccctgggccttttcttttgccaaaatggagtttatggggcatgtgaagatgttctccccagctacaggtagttgtcatttgtgtatctgataacgtaggcttgaaaacagtgactttcaatttgactgttttacacctgacaaaatggatttatagcctgtttttaaaaattaagttatttcttaattatgtaatatttggaacttaaggtctagatcccgcctcagtttgaatacctctaacggcctggagctcaggtgtcttcccaggcaacttatcggtgaactgctctattggaaagttaaaaaagtctttcttcag

SEQ ID NO: 483 - DNA, 574 bp, Homo sapiens
  Genbank Accession No. AI472331
tttttttttttttcaatgggctaatttaatttttaatctatatttgcaggatttgccatgtacgcaacatagtataacttatagtcaaggattaaaggaaactgcatttttttcaattactttaggtaccaaatcatattaagaacattcagtgtaaggtaaaatagacctgaggtatgttatatgagtgggtaggcattttcatttagtcagtcaattaaatcaactttcaaagcaagtgaaattatattcttatactatatgggatccttgaacttatgaataatatattttaaaattactgtcataaataatattagataaacaatgtaaaaagtctaacatacaaaatcaatgctaagagtaacattttcttggaaataacattacttttataaataagctgatgcagatcaatttcacatttaataacttataaaaacaaagtcagtgttttctagtttcatatgcaaaagcaaagtaatagttggagtgtatgtaacctacattaaatatgtcttagaaaggaagataaatgaacttatcttccatatgcaatatgtaaatacgttaa

SEQ ID NO: 484 - DNA, 604 bp, Homo sapiens
  Genbank Accession No. AI479262
  misc_feature (1)..(604): n = a or c or g or t
ttttttgtttccagcatttttattggttgctgctaatgtggtgtgagcatatcccctacactctcccagctgggagtgggcccctctagaagcatccaggcttgggtgggattgcttagtggttgactcttggcaggggaggtgctagagatgaagatggtaggcagcagaactaacacctccacacagcaaacagttcacatatgtttggctcttcactataatggagctgcactctccatgcccccctggccttctaccccttcagtgttgggatcttccttgctcagttttgttgatcagaaagcatcagattctgagaacacaagctccatggtgggccctggtgtgggggagatacatggcttctgttctgaattcacagggcctgggggctcanagcgctgtangctgttgcggcgggaggtggggaagctgcccttggagaggcggcgctggcggctggacagcatagcagctggggccacaatacccggtgggggctgcttccccagccggctgtacaaatcttcaatttcttttttctgtagtgcctgtaggtttccacctctggcaagtgcttctgccgaagactctgcagctc

SEQ ID NO: 485 - DNA, 488 bp, Homo sapiens
  Genbank Accession No. AI479633
tttttttttaggttgtggaggactttattcattagacccagagagccatgagtgcccccacgaagtccccactgcagggagccagggtcctagatgccaggccaatgcatgtgccgtgagctggccgaggggtctgctggtcccaagagcgcctctgtgttcttcagacagctccgggtatggtggcctcgccaggtggcttgaactatcttcgctgccatttgctgctgcctcatctgctggcggatcttaaagcccctccaggcggactggatggctgtggccgctttgtcctggcgatgcggctgcctgggactcagggcagccagctggtaggcggaggcccaagacactgccccggggccctcagtgccctggcccatgccctgcaccacacgggtgggctgtgtgcgtccacaggtatgacaagtgcgagggctggagcccactagcatcaccacgctgggcgggctcccgatcctggagct

SEQ ID NO: 486 - DNA, 465 bp, Homo sapiens
  Genbank Accession No. AI479933
  misc_feature (1)..(465): n = a or c or g or t
gcggccgccggagcccgagctgacgccgccttggcacccctcctggagttagaaactaaggccggggcccgcggcgctcggcgcgcaggccgcccggcttcctgcgtccatttccgcgtgctttcaaagaagacagagagaggcactgggttgggcttcatttttttcctccccatccccagtttctttctctttttaaaaataataattatcccaataattaaagccaattcccccctcccctnccccnnnncctncccncnntttccccctcccccncccnccgggccaaaannncccccccnnntnncccnnnaaaccttcccctnttcnaccttttttttttnttctcnaaccatttccctgaccaacacaaanacnatcttttcggcaaggacatttttaacctgccngacaccaacatgaggagggctctgtggccgaatgtccggaagaagagaacga

SEQ ID NO: 487 - DNA, 448 bp, Homo sapiens
  Genbank Accession No. AI480215
  misc_feature (1)..(448): n = a or c or g or t
tttttttttttgtttctaaaagatgtttattttccttaagagtaaaaaacagtcattgcattcagaaaaaaaaaaaaaaaagtcaataaagatacaacgattgttttggaaaatctgcagcccgtggattccgaccagattcagctgggagccgggccaggctttaggttggggaatgggaatgaagggaggggctggggggggggcatgaatggagtcanggagtcngcctttcacagaacaggaaacctcccccccccctgtgccccctctccagtgtggcggcaggtcgggagggaggaggcttctttgctgtgagatgaccaggggccgggatgggggaggtgagacgtgccaaacttcttgcagggagacccaagctgtagctcctgtcccacaacaggtcctggaagtcagtccatcctcccgtgccacccagggacctaat

SEQ ID NO: 488 - DNA, 830 bp, Homo sapiens
  Genbank Accession No. AI480357
  misc_feature (1)..(830): n = a or c or g or t
acaaggctttggattttttattagttctgcaataaataataggtttatagttcacctgttgttgatctcatcagtggtcgccaagtaagagggtgaatcactcatcccaagagactctgctacctcttagctctggagggtaaaaagcaagggccagagcaaatacattggggagagggggagaaaaaaaaaatcaggctattttaatagccctcacatgccaagtgcttttgattcatcatgtttagttttcataagcttgtgaggtagataatattatccccattttatagatgagggaatttaggctccaatgggttaaataacttgtacaagtacacatactgaatgactgccatgaggagggatgtgaattttggtcacgtgccaacacctacactcttcctaccataccacactggacaggtaattgtctagtccctcctgaaccactggtcacctccccaagctgttaagaggagcgaggggagcagtgaatagcaacagacattctanaggtgagccagtgactggaatccaggaattggtgctcangaggtagagaagcatcccggagaactgagccgccttcacttctgggctgaggtctaggcctttctgctctcatcattggctagtgaaactgctcggcgaccctcatcaagagtctgtcttctatcatgtggaaggatcttccctagtgtccaaggtctaccaaaccttgtcccgtcattttcctggtatttncttgtcacctnctgggcttttctccggaggtgcattgagatgtgatgaaggctggagaaatgcaagtggacatggcttttcag

SEQ ID NO: 489 - DNA, 453 bp, Homo sapiens
  Genbank Accession No. AI492051
tttctttgtcaccacgcatctttattttcggttacataaaacacagctgggctgggaagtgtgccttccctgaaccccaggatggagctgagcagggtacaggacaacacaggagatgaagggcattgcggagggcattggacctccccacccactacagttaactcaagacaacataccatgctacaaagtcaccccattaacacatcctttccaagtcaagacactgccttacaaatgaactccaagactatagaaatgataaataaaaatcttgttcaaatatacagtatctgctattataggaaacatcagggcgtacatatttaacacagctgaacagtaagatacaggagccagaggaaaggacagcgaagctggaagcatctccacagtcctgctaagcagaagctaacccacagatctgcagccagctcaggaacattcccctcc

SEQ ID NO: 490 - DNA, 479 bp, Homo sapiens
  Genbank Accession No. AI492091
ttttttttttttttttttttcaaactactaacatctttattttgccaagatatttaacaatattaaaaagttcaaatttcttcatggccatgtcttttaccagcttttcaaagattcattcagtagtagaaacagccaaatgctgctacaacgcaaaataaactgtcattcatgaaaacatcatgagtatagttgtcagggtcagcatcccaaaaacagcgagaagccatgaatactccttcacctttttgttctccaatcactacttgcaccaccattttgtatcagtcaaatcccatttcttttaatttatctttaaggttttctgataaatgttttgtaagctgaggcatttcttctggagaatattcagcatttgccagttcctccttgagcacagcatggatacagtctttaaccacagagggcctgaacctctgctggaaaacaggccgcagaatataggtgttctcgggctc

SEQ ID NO: 491 - DNA, 547 bp, Homo sapiens
  Genbank Accession No. AI492154
tttttttttttgcttttgtcacatttattcaaactagcacctccacagtcaaagtgttgtcatcctacagcctcaaggcccctcactctcaatgtatggaatgtcatggtacttgatgttattgcatgcccattgctgcaaggcatcacacaagatatcctgagacaggcggtgtgcatattccaagatcacagtattggtccctggaggttccttcacttcctctttgacattaactggagaagccatcctaggtagacatctctcttctggcataaagggttcttcactctcatgctgcttctcaccttcatatatggtaggaaatgggaaagtttgctttgatttcatgcagcccatgttatgaagagctgtttgtggaggaagcagtggcaaagactacttccaggccatctttagaaaacaatgaaatttgtccatgtgatgttgaccagtgctttccctctccagggcacttcagtaatcaatgttccctttcaccactcttcacgtgtagtgtttacacaacacgttgcccggcagctgc

SEQ ID NO: 492 - DNA, 477 bp, Homo sapiens
  Genbank Accession No. AI492388
ttttgacaactgaattaactttattctcttctaactgcagattcaaggtatacaactgaacattgctatttttcttatgagacttataaataaaaatacaaaaaatgttcactacaaaaaaatctactgttagtaggatgtaaaaaatattctctttgctatagaaggcacaaacttcacttagtgacacatggagagagaaaaaaacctgcagcagtaaattcattttttctttttttttccttttttttttttttaaatcttgtcagaaacactgaaattacaaagaaacgcgtcaatctacacgaaacgaaggcagatgcggaaagctgcaaccaggactgcacaacttcgagtgaaactgcttcggaactagaacagataaggagcggcaagcacaactcggggaagtgggctggggagggggcagcaggaggcaggagagagggagagagaatggagtggacagaaatgaga

SEQ ID NO: 493 - DNA, 521 bp, Homo sapiens
  Genbank Accession No. AI492879
gacataagaacagttttattttaatcacttaagacttgtgcattattcaattttgagactgaaatacttgtttccctttcaactgattaggaaatggtctgagctggcagaagttaatcctcacattattcagctaatgagagacagaatcctaaaacctgattccaacttccgcctgtacctcacaatgcaagacaaagcctttcattttaatgttgtacacatataaggaccatataatctggattaactttaggtaacaataacttaaaagataggaaaatgtatcatattacagagatttaaaaattgtctatacaataaatgatgaagaaaactaacaataaacaggacgacgttcaaatactgaatacaattaacaaatggggccaaaagatcaacatttatctctcatcatctttcatgcaatgtctcagctttcttctcccaaacataaaggcagattaattcaaagtagccctattaagaatatttgtttatcacgcctgcaatcccagcac

SEQ ID NO: 494 - DNA, 487 bp, Homo sapiens
  Genbank Accession No. AI498375
atggcttggtcgtttaataaattcacataaacagagtttatttggcaaggcaaactgggatcgctgtccgccagtaggttagggtgagtgtgatgttgtacaataaatgaaaggttctgtgtgaaggagagtgagcagggtacaacaaccaaaaaggcaaactacatatttgaaaacacagctgtggttcatactcaatcatttcatatctccaagagaattctttttaccaaaaaaaaattgcatacaaaggttagtttaattatcatgtgaatgtttgaaactctctgatataggaaatctcccaggattacctgtctactaaacagatttccttctctttccaaatacattattgatcaatttggccattgatttagatccactgggacgtctcttttctttgagtttgaagtttatcaggatgtccttgataattctgataaacatcatttccacctccagagactgctctgctgcagacagt

SEQ ID NO: 495 - DNA, 425 bp, Homo sapiens
  Genbank Accession No. AI498957
ttttttttttttttaccaggccaaattttttaatttttttgtagagatggggtcttgccatgttccccagtctggtctccaactcctgggctcaagtgatctgccggcctctgccttctacagtgctgggattgcaggcatgagccaccacacctggcctccttatctttttaagtcccggcacaaaagtcgcttctgtccttcatgaagcctgcacactctggtgtggctcctgtcgcaatctggacctctctccagttctagagtgttgtctgcttttgtgttaattcctccgtcagcagtgggaggagaaccacgtcactcgtatcttgtctctctggtgcctagcagagtctgggcacaccgtggcactcaaacataccccctgaatgagtaagggccaaccttgaaatacctgggagctg

SEQ ID NO: 496 - DNA, 512 bp, Homo sapiens
  Genbank Accession No. AI499220
agcggccgcgggggcggcggaggatatggagtaaagccagagtcagtggccaggcacgaaggcagagcaggaacagccaggaggcgtttattaggggggcggggggaaagagccccagcaccgcccctcctggaagaaggaagaggtaactataactacccaatattgcagccatggagtccatgcttaataaattgaagagtactgttacaaaagtaacagctgatgtcactagtgctgtaatgggaaatcctgtcactagagaatttgatgttggtcgacacattgccagtggtggcaatgggctagcttggaagatttttaatggcacaaaaaagtcaacaaagcaggaagtggcagtttttgtctttgataaaaaactgattgacaagtatcaaaaatttgaaaaggatcaaatcattgattctctaaaacgaggagtccaacagttaactcggcttcgacaccctcgacttcttactgtccagcatcctttagaagaatccagggat

SEQ ID NO: 497 - DNA, 699 bp, Homo sapiens
  Genbank Accession No. AI499240
ttttttttttttttttttttttttttttttttttttttttttttttttttttttttttttgcaggggcccaaggcaacgctgggggctttatttccatgctgggcccccggaaaatatgtacagggggtacctgccaaacatcctcgtgcaaccgcaaaaacccggggagggggggcttgccggccgtcccacttatttacccggaaacagggaaaggcttttttgggggtaggggttgggcaaagccttatgcataacggagcatgaaaagacgttcccctgttgccacctgtttttgtccacggggagcttgctgtaaaagaaaaaggacccctcggaatccaacacgggaggcgtggttttgtaattgttttccggctgcccattgctctcccactccacggggatgtcgttgggataaaagcctttgaccaggcaggtaaggctgacctggtttttggtcaactcatcccgggatgggggcagggtgtacacctgtggttctcggggctgccctttggctttggagatgttttctcgatgggggctggaagggctttgttggaaacctgcacttgtacttcttgccattcaccaggccctgtgcaggacgggaagacgctgaccacaggtacgtgctgttgacttgtccctccgcggttttgctttgcattatgcacctccacgccggcacgtac

SEQ ID NO: 498 - DNA, 462 bp, Homo sapiens
  Genbank Accession No. AI499334
tttttcaccctggcattatttttaatttttattctgtgaaagataccatgattataagagaccatcataacgatacattcaagagcaaaaaagtaacacaaagcaaaattatcacctttaaaaagccaaggaaattttgaatacttaagatggttttttacttaaaaatattctggatatttgcttaagatgtcaaatactttgaatttttttgtatttaacagttcgtgggtatggcaataaggagcaggtgtttgatctgattatttgatgggcatgctaacaaagcatgtgtcatgggattgatgaagcagctgcttaacttcctcagaacatcctaatgacaactttctaaagaagcaccacttgttacatcggcttctgtggcatgttttctataactgaataaattatcatgacctacgattgcataataacagacatatttatgtaccacttcct

SEQ ID NO: 499 - DNA, 490 bp, Homo sapiens
  Genbank Accession No. AI522299
ttttttgaaaggagggaggagtttattttatgctgtttaaaacatatattacatatgtaaaaccattctattgagtctgaatctctattttattagcaggctttatttaagcatacctactaagcttacagaagttccatctaagtaaaattagttaactgataccctttttatgtagcaatcattaaatttttaaaaatgtaaaccctttaaaattacatcatatgtttgattatctcattaaacaagttagcaagcctaatttaatctttcaggaaaactaaaggccattattctgatatattcactgtattgaactataaaccagtgatgccctctagtggtactgatggacgtacagtttaccttccctgttaggatgtgtttaccctcgtcggctaaatttaccaagactgttgtttcaggtggcagtacttgtctcccacctcaataccagcatctagatccatgttctcaaaacataatcagc

SEQ ID NO: 500 - DNA, 509 bp, Homo sapiens
  Genbank Accession No. AI524085
ttttcaggttggacaggtttttattggagagtcaggagttactttccttccctcgtccctgcctcccccactcaaagaaccccactccagtggggcttgtccttcatctgcccctaggaatccccatccccagctacacaggcactcagggagagcgcacatgctgtgtgggcagacagccccaggccaggtaggcagtgagctccctcaaatcctcccacccccaggactcaggagggaggggcaggagaggtgtgggcccggtgtgcagtcctcaggcggcctcctgagctcgcagccagccaggccttgtgcctccaggatggatggtgtgatgaggcacatgccccgtagcctttcccttccggagggccttaaccaagaagtatcttgtttaggggctggggacagggtggggaagatgacaggaggacagctgacctcttcaccctgagaaggcaagaggcacttctggggaacagtcctggactcagatggctcaaggaaga

SEQ ID NO: 501 - DNA, 639 bp, Homo sapiens
  Genbank Accession No. AI525044
  misc_feature (1)..(639): n = a or c or g or t
gatttcggcacganatttcatccagttataaactagggctcctgcaagcacccccattctaaggntganttattgaaatcagttgctatttgatgagtcacaactggcccagcaggcagggcatttnaggtcatggtcatcaaaaagaaatgattgtttttngaaaagctaaatgcttaaaatgcttctngagggaagtcgtggggcgtgtgctcattctctttaaaatcagggttgttgagtttntttttaaacattttnataagtncatgnggaaaantatataantnctnaggacccancactggatttcccagnaacatggccctcngctgggtcttngggccncannancattgggcccctgggggtcacaanggttgcctgtggccnctttgggtgntgccngggtttgtcnacnnanttattccgggggaaaaggccngnnntttgntnnnttccccngggngcccntcccnngggttggcccnggncccnaanngangnnntttaatntcncnnggncccnnnnnnntggnntttnctnnggggtnnncnntnacccnnntnggatntngnaanttggcnatntgcaggttccnttnggggantgantnnccnnttntnngggtntntntt

SEQ ID NO: 502 - DNA, 1000 bp, Homo sapiens
  Genbank Accession No. AI525601
  misc_feature (1)..(1000): n = a or c or g or t
ccccccnggncnccgggggnttggnggnngggncccncccggccctcccattnaaggacccnnaattnnggnttnggaggcctcccccccctnnggggggnggntttncaaangggnngaaanttcntgngggcaacntnnanannncaaggnncaaacgcggaaaccggntccnnnggcagtctggggaangcanncngcnagngcaccngggaaantgtgngcgaaaagngcngggcngngcagggcagggntgggcccntntntgngggcgcnccggaaaagtgggcngtgcggctcgcagcntgttcgcggccttccctggtgacggagctgctccccccgttccagagactcatccagccggaggagatgtggctctaccggaacccctacgtggaggcggagtatttccccaccaagccgatgtttgttattgcatttctctctccactgtctctgatcttcctggccaaatttctcaagaaggcagacacaagagacagcagacaagcctgcctggctgccagccttgccctggctctgaatggcgtctttaccaacacaataaaactgatcgtaanggaggccacgcccaagatttcttctaaccgctgcttccctgatgggctagcccattctgaactttgatgtgtacaaggggataaaggnacgtgggtgaaatgaagggccgaaagagctttcccagntggacattcttccctgnatgaataatcaaaatggnactctaaaccctaatgnnntgttttnanattcatttgnaattttaaacctaagnaaagctnagtaaggggnttggggaaaatcctgggcnaanctcttnggtttctnanaaatttgggaaaaaatcccccccattctnaaagnaaaccnccanaaaggtttaaaaaaaagtctggaggcccttnnaaaaattttgggggaaantatttaccagngaccannaaanggnaggttaacctccaantnngagtttngc

SEQ ID NO: 503 - DNA, 773 bp, Homo sapiens
  Genbank Accession No. AI525822
  misc_feature (1)..(773): n = a or c or g or t
gaattcngcacgaggcggtggtcggctgttgggtgtggagtttcccagcgcccctcgggtccgaccctttgagcgttctgctccggcgccagctaacctcgctcctcggcgccatgaccacaaccaccaccttcaagggagtcgaccccaacagcaggaatagctcccgagttttgcggcctccaggtggtggatccaatttttcattaggttttgatgaaccaacagaacaacctgtgaggaagaacaaaatggcctctaatatctttgggacacctgaagaaaatcaagcttcttgggccaagtcagcaggtgccaagtctagtggtggcagggaagacttggagtcatctggactgcagagaaggaactcctctgaagcaagctccggagacttcttagatctgaagggagaaggtgatattcatgaaaatgtggacacagacttgccaggcagcctggggcagagtgaaganaagcccgtgcctgcttgcgcctgtncccagcccggtggcccgggcccagtgcatccagaagnaatccccctggnggaagtccagcctcgttngggtnactctgactgnctgaacgtgncggtnnggctngttcnccaatgnttgtgnantggnaaaanttgggnctngcntganaanctcttgggnttttgttcaattaaaaaaagnaggcncntttttgtaaaaaaaanaanagannnaanaanaagngggggggncncagggtcccaaattccccnaangngggncngnaattta

SEQ ID NO: 504 - DNA, 528 bp, Homo sapiens
  Genbank Accession No. AI535997
  misc_feature (1)..(528): n = a or c or g or t
agtggatcccccgggctgcaggaattcggcacgaggnaagatccccagaaacctgggagttcagggctgtctgaaagctgctccacagccaatggagagaaagacagcatcacccttatctccatgaagaacatcaacatgaataatggcaaacaaagtctctcagcagagaagggttctttaaaagcaactttggggtccccatgagtccaaggatgatgcagctgccctgtgactacaaggaggaagagatggaattagtagaggcaatgaaccacatgtaaattattttattgtttcatgtctgcttctaggatcttaaaggacaattagcattggcccaggatcttgggagcaagctaccaacaggggaggactcttttcctgtatggacaggttgttgtggaaatacttgcctgcttctccccacctcctcaagagccacaggaaagaggngggtgacaagagagagagcaaggaaagtgagaggnnngnttnggatacttttcttcnttnggaattaaaang

SEQ ID NO: 505 - DNA, 426 bp, Homo sapiens
  Genbank Accession No. AI537407
tttttttttttttttttttttttttgagacggactctcgctctggggccgagactgaagtgcaatggcgcaatctcggctcactgcagcctccgcctcttgggttccagcaattctcctgcctcagcctcccaggtagctgggattacaggcatgcaccaccacgcccagctaatttttgtatttttagtagagacaggattttaccatgtttgccaggctgatctcaaactcctggggctcaagcaatcctcccaccttggccacccaaagtgctggggttacaggcgtgagccacagtgcccagcccctgtaggtcacaattttacaagtgtgtaaagcactgtttttgttggctgttgacatctctagcgcttcctcctggtctgtgggtctgggtctatgccacgagtacagcactggaaaa

SEQ ID NO: 506 - DNA, 774 bp, Homo sapiens
  Genbank Accession No. AI539386
  misc_feature (1)..(774): n = a or c or g or t
gcggccgccgccccagggctcgcccggtcctgtctccgtccctgaagcggtgcggcgctcaggtgagcgaggtgtcgtcgtcgctgccctcgccgcccgcgccgcccatccgctcctctctgctctcggccaccgcgctctcgtcgatgttctccagtgagtccgcatgctgcaccgacagctccgacagcgccaggctcggcaacgggctctgctccgggtgcagccacggcttgaagtgaggcaggtgcttctgtttccactcggggtacttgaggcacgccttgtacatcttcttcatggccttgggagccaggaactgagaagatttattcaccacccacttgggtaaggagcctttggggtccacctgggccaggtaggtgatgacgcagctcttgggccctgtgctctggatgaggtagcccgtctggatggacacagcttcgacccaggtctttccaggtgggtatttgggatgtttgactgagtagttcataatgatgtaatcagcgcccatggggagccaggagcggagggtgatgacatcacggttcttcaggggcttgggacacctncaggagtaatagcccacgtcagcgttgactgtcaagcgggcgatgtcaaaagtctcaatgacggtgctgtcccatttcttgcggtactcaatgtcgtgtaggacgtggagagtggctcgggctgcacatcacagcacttcttccggcacatctaggtcgacagatgatgggttggctggtctcccccctctgcccg

SEQ ID NO: 507 - DNA, 942 bp, Homo sapiens
  Genbank Accession No. AI539443
  misc_feature (1)..(942): n = a or c or g or t
tttatattatagcctcttttagctctttaagtcttctatgggtttaatgggaggctttagtggtgtatagagggtgtgtgtgtgtgtgtgtgtgtgtgtgtgtgtgtgtgaaatggatttattttattctacaaatgaaatgaataaaatcacctgaaatggaacggaatggctacagcgagtgtccaaagaccacaaaactgtttcctgacatgtgcttagcatatttaaattgttctcacagtatcatcctgagagcagagagagcagtccaactgctccacaggactgcagagagggaaccaatccatctattttctcaataatggtgatgacagagatggaatgctgattgccaaatcccaaacacatacgggcctctcacccaaaggccatgatgcctttgtcttaataacagaataaacccaatcctgtacaaacagcttcttcagggtgcatgttttgaatggggcaaagattagctttttgtgggaggctntccaggataccggacaaaagcatgcactagagactcactaggtagattcaaatatctttctaccatttactaactgcttgatcttagtcaagttacataaaaggggctgtgtggggaggaggggctcttgtccacatctgtcaaagtatgaataacaattacaccctaactcgaaagtggctgtgaagactgaatgaagtactacctgtgaagtacatggtatacctgtaggtgctttaatgtcacctattaaatgctgggggtgatgaggatcaaatttcgccagggacccccacccgagggtataactcatccccccttttcacacgtgcctcgatgctaaattatntcntcgaaatgggcttactttttcantccattntcgacccaggcctcttgcagcttggggaatcgaaatcttaccggaatcctttttcatcgaa

SEQ ID NO: 508 - DNA, 461 bp, Homo sapiens
  Genbank Accession No. AI540204
ttgcaatagggaattctcatcagttcaccagaaattacttttctgctgttttaaaaaaaaaaaaacagatggggagggaaaagttttctcctctttccactgagccagcgtttgcataaaatattgatgagactgctccccatcacttgttgcaggaacaggctgcttctggtgtcaagtgctggttaatcaaccaaatggcagatcaaattagctaagttctcttgttaagtactgcgtgtcctgctctttcccatggaggttctggctgctttaaaacctgatctgcagaaataactgttgtatgctcaaggagctctgaacgctgcaggcggcaatcctgttcattactgtccccactggacagacagagaaaatgtgccagagagtcactgcctagatcagccaggccagcagacggggagcagaaatcaagcacacatactgcccgcccgggtctc

SEQ ID NO: 509 - DNA, 706 bp, Homo sapiens
  Genbank Accession No. AI546943
  misc_feature (1)..(706): n = a or c or g or t
ttgcaggaattgggcacgacgggaaatactgtattctgaactctatctgcagaatgagtcactacaccaaaatagttctattatttagaatgtgttaattttaaagggacctgataggtatttatttacatatgcgatccacatttgtgtgaaagcatgtgatcatactaacccagcctcctggaatgtcgctgtacgatgattgatgtctttttctcagtccatagttacaattgtttagtatgctaatcagtccagttccctgaggtttaagatcaaatataaatnactctgcttttcgactcattcaggtagcattgtacctgaacctgattgctactttttcatcttaaatattatatttcctcatctaatctgccttcccctcatccacagncattttggngaagggaaatgggagggtggcttgtaatccctttctccttttgcttttgnccccngttggtaaggcttggnagcggcagtttnctcgggtgggnnttgggtnagnagccgtngggtnaggcagggtgnttgcngggggccaggggagaggcttaagagggnangtggtggatttacttncnttgcacttccacttgccctccttgggnattnntgggccaaggcctttgggccctttannctnacanccnnggngangggccccctaaatccncggnacctcatgncccttaaanggtgg

SEQ ID NO: 510 - DNA, 648 bp, Homo sapiens
  Genbank Accession No. AI553918
  misc_feature (1)..(648): n = a or c or g or t
tcaaagtgcattaatatatttattcacatcctcacggtcttaaatgtgtatttacagactccagcaggtaattatgtcagtactcctcagactcccagaaatttcaaatgatccaggcaactcttgtgaagatcaaattttcaaaatcctcaccaaggacatccttcaggtcacctttatgctcccagatggtattcagctagcagcagtctacacttcaggcatccatcttccacctgtagggtaggtgatcactcccgacgagcaccgcacgtggaaacagctgtaaccaggcacgctgcttttaagttattttatacgggggcagggcaagcataaagtcagttatacggtaaggccttttcactgacgaaaataaaaccaggcttatctggagaactccctggcatagtcgatgatgtaaacaaaatcgacgaagcttcccgtttccaaacgtgggaacgcaggcctgaggccaggccgctgcccttgttcacggccccggacacttcggacacaggccgccgcagtcgactcaccagacttcaggtggcgcgttcccgcgccggcgcccctgcgtganagaccacgncgccacagccagcgcatcccagagaccagagcaaaaccacagcagctcgtgccgaa

SEQ ID NO: 511 - DNA, 503 bp, Homo sapiens
  Genbank Accession No. AI554514
  misc_feature (1)..(503): n = a or c or g or t
tatgtataaatataaagtttatttagcatagtgtttagaaaaataagttcacatcatttcagaaaacaaataaaacacttaattgtccaggcataaacccccattacagtacgacatacatacttcagatctctttggttgggtaattaagcacagaaatgttctgggacatgctctgtgtgccatcacctaacagtgcagtaaagactctgttaccccaccccatgacatacattctgtatagagtttctctttgtgtaaggcacagtaaaaccatattgagtatataattggttgcctctaaacatacagtacatgcaacaaaataatatttttgagaactctgaaagccaaaagagtcacatgctatacaattttgattaataaaatgtatggtggtaaattaacataaaatgtatcaattagatacaaagtaactgctaggctctattatctaagttntacaaagagtttaaaatatcttttgtgaatgtaactatttc

SEQ ID NO: 512 - DNA, 867 bp, Homo sapiens
  Genbank Accession No. AI557210
  misc_feature (1)..(867): n = a or c or g or t
gaattcggcacgaggcaacatctatgccaaatactgtgcattctacaatggtgctaatctcagacctaaatgatactccatttaatttaaaaaagagttttaaataattatctatgtgcctgtatttcccttttgagtgctgcacaacatgttaacatattagtgtaaaagcagatgaaacaaccacgtgttctaaagtctagggattgtgctataatccctatttagttcaaaattaaccagaattcttccatgtgaaatggaccaaactcatattattgttatgtaaatacagagttttaatgcagtatgacatcccacaggggaaaagaatgtctgtagtgggtgactgttatcaaatattttatagnatacaatgaacggtgaacagactggtaacttgtttgagttccccatgacagntttggagaccttgtcaatagcaaatccatttttggtatttaaaattttttggacctggatttggaaaaaccnccnttaaaantatcttttaaaaaggtaaaanactaanannaaaaaaaaaaaccccgnagggggggggcccngggtanccccaanttccgccctnaanaggtggaggcccggtntttacnaattccactgggccggcccggttttaacaaaccggccggnnccctggggnanaccccngggnggtaccccaacttnnacccgccttnnnnggaaatnccccctttncgccaagctgggggaaananngganaggcccgccccgntcngccntcccaaaagttnncgcccctnanngggnatggnnaattntaccgngtaaattttggaaaaatcccgggaaattttggaaaccagnccnntttnanccaaggg

SEQ ID NO: 513 - DNA, 530 bp, Homo sapiens
  Genbank Accession No. AI557360
  misc_feature (1)..(530): n = a or c or g or t
ctgcaggaatttggcacgaggtgaattgagacttggaggtgcttttcatgtttggagtatcatctctgtctgggatctgggctgacaaatnaaaacctagagtagtgcttatgctgaaatgatacttttnattttttggttgatttttttgccttcccttcaatttnaaactgaagcattttaatatgggtagaaactctacaccaaatacactaaacattttggtgcttagtggatttctttttaggtaactggtacttacttccaaagactgantacaagccacactccatcatatcccttaancttcatgaaaaaccattcaagatccccttgctgcaacactgtnctcttntnctctactaaattctatttccaaaattggtaatagagccaganggatccccagtacccaagcctctgcctggnacaaagtggtagcacaattaatttcagtatgggtggagcatggtcaagtcttggngcctagnaggagtagttgcatagnacacaatcatttgntaaggtnc

SEQ ID NO: 514 - DNA, 565 bp, Homo sapiens
  Genbank Accession No. AI557450
  misc_feature (1)..(565): n = a or c or g or t
atgcaggaatnnggcacgagntggcattncatgtatatatgtatataaatgcaggaaaccaacatgtcattgacacctctcttctttacttttccccatatctaatcattcctcaagtcttactgattttnatcagctagaatctatctccttatttctacctctattgccactctgatccaggctaccagcatttccctctnaggcttctgaagcaacttcctaactcccacttgtgctcctnacactcactctggtcggctatccattcattctccatacagcaactagagtcattcttttaaaattgcggacctgatccttccatctcccagctgaacgcttttnatttgcttcctgttctcatgagtatgccaaaatgtattctgggctaggaggcctgaggaatttggtccttccctcctccccccctcgttttnctgtggttnggcctaaanatggnttgcctttcttttcccttaaanacnatcatgntnctcnnccctatttaaggtnccttttcccccgaaggtattggaaacanttatttncttgnaagggtttt

SEQ ID NO: 515 - DNA, 564 bp, Homo sapiens
  Genbank Accession No. AI560064
  misc_feature (1)..(564): n = a or c or g or t
aaagaaagtttactatgtgtaatgcaaggcacttatgtctctgcttaaagctacaagggaaaaaatgacaagcccagtttttttcaagggaaatattttttctctgtgaaaggtcagtagtaaaagagctagtttaaagtcatggagtttttgccaaaaaccatgtctcgaggttttatgcatttctaatggctttgcccataggagagatacccagagtggcaaacagaggctaaggaaaaaaatgctgttcatttagatcagaataacctcgctccaatctggaaaccactcaaatgacacatacaagtctgtatgaaaagcaaaacaaactcatggtgatatgcagttattccattcaacatgttaaaatgaagacagagtattttaaatgcactctagtttcctgttccatcttcaaattaaacaatcatcctgcttattctagaaaacntntttttttttttttgagacaggggctcaccctgttgcccaagctgaagtgcagtgtaaatcatagctcactgagccctaactccctcacttcaacaatcctccgcctca

SEQ ID NO: 516 - DNA, 746 bp, Homo sapiens
  Genbank Accession No. AI560159
  misc_feature (1)..(746): n = a or c or g or t
tttttttttttaaaagttacataagtaaatttaatcatagcatactacatagctcagctgtattagttatgtagacttttgatctaatctataattgtgacaaaactataccgagagaatgaagaagtggaaatatatgtggaacagagccttcctccatggtatgaaatagatttctttaaaaaataaaaaaaaaagaagtgaacaatataagcatattacttagaaacatggaggtatatacctgaaaaactcaagagttgaaagtggtcacctctggggagtgggaatcttgaatgggaggaatgggctggggcttttttgttataagccttgactttttaaattatgatcatgtgtaactgataaaaataaaagttagaataaaagcactagcacaatgtctgccataaagtaggcccttgataaagaatggacatttatctaattggcccatctctccactgctgctgccccacttcttgcattcagcaatatagacatctgaccgttcctcaagattctattctcacccttcctaacaagtatgacaggaaaaaaaaaaaatcacgggttcattggacacttntattgttacttaatgatcatcaatttggctcactactacaaaatggatttcaatctggttcattgcttagtgtgggaccaggccaaagctatcataataactacatcaaaagagactaagctacccttgtcacttccttttacaggcaaaaataaat

SEQ ID NO: 517 - DNA, 522 bp, Homo sapiens
  Genbank Accession No. AI566038
  misc_feature (1)..(522): n = a or c or g or t
ttttcaaggaaaacaccagaactgaagttacagagaatgaaataccagcagcacagggacagcgagagtcttttggcttttgtctgtagcttatatgagcagagtccaatatccaattaaatagatagaattcactttacgattctaattgtgctgagatccctaaaggtgaaagatccccatccttccagcagcagcagggcagcatgaagactgccaggcctcccagtcccccagcccccacatcccttggccttctggggagggggaggagctcccanaagggggaggagctcccagaacgcagcggctaaaagcctattttgcccctggtcatggagtagcccagtttcgcctcgttgttaatgaaggacatgagtcccacgtaggtctcgatgagcagggggcgctccaggatcagcacgccattcgcctgtcctggcaaagggctttctttttgggcttttttgacagcttggattaacagagccttgaagctttccaactgacacagagatgctg

SEQ ID NO: 518 - DNA, 393 bp, Homo sapiens
  Genbank Accession No. AI566193
ttttttttcaccatcactcggttttattggttttgttatattagcctctgaagcaggcaattattggtgtgaacatacatcttaaaaagcatcatattatggagtcaagagtgtgcaagagtcaactcagtgcaagtgctgttggtgagcattacgtgctgaggatgaaatcggaggcccgacaggcccaggaggcctcacgcccaggggacagcagaccacgcttcagaacggaaccgccttctccatgtaaacttttgacgtaaactttatgcttcagggtatctggcctcttctgctccgagagcctctccttccgcgtcccaaatttgggaatggcccggtcaggctcaggcccaggcggtggaggccccggcgtggcagcgccgggct

SEQ ID NO: 519 - DNA, 458 bp, Homo sapiens
  Genbank Accession No. AI570222
  misc_feature (1)..(458): n = a or c or g or t
agctttttaaatagacttttactgtgaaatataataaaagatttggaaatgatttttaaaatttcaattacagtgttaacaattcaattatctttatgagagaaagcaccacattacaaaaatacaaagaaggactctaaaatgcacatgctaaaatgacttaatagtaattacattagcaaatcatgaaattcagaacctttttctaattacagatctaaatcaggggtctcaaacttagaggtcttcaaggctgagcaggaactacaaagtagagaagttgtctgatataagaaggaagtccagtaggctgtggcaaactggggaacacacacccaatcaaaagacttttcaaattcaaacatttttgaaacattatgtacatctaataaaataactgtgggtcaaactggcctatgtgaactaccagtttacagatctggtctaaatgaatntct

SEQ ID NO: 520 - DNA, 421 bp, Homo sapiens
  Genbank Accession No. AI571525
tttttaactttctctcttttttttttttttcaaattactagaattttattagccaagggatagcagctggaggagaaataacaaaaaaatacatcttaagaatccttaagtacagggcatatttacaatttaagtgtcatattttagaaggccactgtccatcagctcagtaaatgtaccagcttctaaagccatgatgccataggtccatttgttgatgaaattcctacccactgtcctcgggcatctgactctggtctctgcactggcatcaagagaacgctgctcggtggtttaaggctaacaccttacagggtaacactgtaacactggccctggagccaggtgcttttctccatgaaaacttccaccttggtagctcagccgacatagacaacacacaaagcgcagctctgcactt

SEQ ID NO: 521 - DNA, 344 bp, Homo sapiens
  Genbank Accession No. AI572156
ttttttttaccaaaccagatcacacacctttattatcctcaaaatgtaacaaacgggataagaaatccctccctccccccgcccctccccgcagtccagggaagcatttaaaaagccccgcagtcaggccaggagtccgccggtggggcccggggcgccgggcgcccctctatacggctgtagtcctcccgaacaaggggatggagaccggcagacgccaagctccgtgctccaggggctcgcggctgctgagctctgagtcggtccagctggggaagacccggcggccacggtcggcctgcaggcagagggctgggcagggcggcgcgggccgaggggcgctg

SEQ ID NO: 522 - DNA, 490 bp, Homo sapiens
  Genbank Accession No. AI583530
ttttttttttttttttaaggcactttcctttacttttagttatttttaaacacgtatctttatgctcagatctttcttttataactgggttataactggggagaataaaaggatccgggcatgagagaaagtgaaatcaagggaggaagagggcatgcaatgggggaagggaggagcaggaatgtccactttactgaatacaaaatactgtaaaagatggatcctgccatattcttcccccaatcaacttggatgaaaaacagaaatactacattcttaaacacagttcatttttagtttgtcgtggcaatacatggaaaaaaatcaggccactactaagcatctatagagtgtatctttggcaaaaatgtggacctgcaacaattcagatggttttctttcaattaggttcaaaaatcatggctctgtaaatttccaaaacttttaaagtcttctcatgtcttcttataatcgggcattcagaggtacg

SEQ ID NO: 523 - DNA, 677 bp, Homo sapiens
  Genbank Accession No. AI583942
  misc_feature (1)..(668): n = a or c or g or t
ttgacggagtctcactttgtctcccaggctggagtgcagcggcatgatcttggctcactgcaagccctgcctcccgggttcatgccgttctcctgcctcagcctcctgagtagctgggactacaggcccccaccaccacgcccggctaactttttttgtatttttagtagagacggggtttcactgtgttagccaggatggtctggatctcctgacctcgtgatccgcccgcctcggcggatcaaagtgctgggattacaggcgtgagccaccgcgcccggcccacacagacttttttaaagttgctttgctggaagtttttataaggaatctcaaattaaacttttagaagtttaattgacactaggaagccaaaccaaggctgacttcagactttgtttgtagtacctgtggggttattacctatgggtttatatcctcanatacgacattctagtcaaagtcttggtaatataaccaatgttttcaaatgtattctggtatacaaagagcagattntattgaacttgtngcataactatataaccatancatataaatattcatgaataagttccaagtcttgagcgacacatnaggagaaaatgtaatggctcaatttttgttcacaaagatattttatcaattgtggtagctgggttgctttacagaaaaaa

SEQ ID NO: 524 - DNA, 630 bp, Homo sapiens
  Genbank Accession No. AI587178
  misc_feature (1)..(630): n = a or c or g or t
taatgccaaatgattaattttattggttgttaattcattatttctacctataagggtcaaatgagagagttttcccattcaagcaaattggggctattagcagaagctagttgatttaaccacaccaaataagcagggttatctgctcagtggctgatattgaaccagaagcttttgacaaagatacctctggagcagccaacaactaagatactttctcagacacagaggcaactttcgtcctattgtacagtcactttgcaattagagaccctaaccccattcttctccaagtggggttgtctcatagacccccattccctgggtgcaagttatacattatctaataatacccaagattggattcaattatctactgcttgattctagtcttaattattttcatatttttcttcttggttagggatataacacttacagatatcttaaagatatccaattcgggctgggcactgtggcttaacacacgtatccccacactttgagaggcctagttgggcgatcccctgagttccgagtcaagaaccagctgaacaacatggagacccctggctttactaaaattcaaattaantgttgggtggggtcatgctgtattcccactactcg

SEQ ID NO: 525 - DNA, 508 bp, Homo sapiens
  Genbank Accession No. AI589804
tttttttttgcttgtaaaatagtcttcccttttattttaaatcaacccttttccaagttagtgccacgagttgagatcagggggtcagagcccactgggatgtggcaggggcagcagggggactcatgtcccccacccccagcttagtccctccaaggatgggaccggcagccagggatgaagggtgcgaggcgaggctgtctgccccctcccctgccagccctactccctagtctgccccctcagctactcccaaggccaaggacagaaatgggagcacagtggccaagagcagggaggcggtcctgtgcaggctgtccatggccaagagtgttagtggtcagagcccaggcaggctgggttagtggggtctcctccggcagccagggaaggaacgaagaggggagccaggctccagtccagccgggaggaggggctcagatagacgactgccactgcacaaagcgcttggattcctgctgagggttgaaagggtcgtcatcgtctg

SEQ ID NO: 526 - DNA, 495 bp, Homo sapiens
  Genbank Accession No. AI589858
gtggagatggggtctcatgacgttgcccaggctggtctcaaacagctggctcaaacaatcctcccatcttggcctcttaaagcactgggattacatgagtgaggcaccacacctggccaagaatttccttaaagcctatgaagtggtgagcctttcatttcatgtggaaggttctggtggctgcaggatggcctgaaatgagagagcaagtgatcctttagagaaatggtttccttttatccagtctgaagctgatgggggtgaaatctggagtggcagaagtaaggctggaaaggaggagctagatcggaggagaaacatcagcaggacttggctgaaatgtgttgggtttgttcattcgtttatttactcagcagatacacagggagtgctcgctgtgtgcttggcactgtggtcaaggaactgagtatgcaacaaagaagagaacacatacagtccttgctctgtgccactcacagtttggcacaggtccgg

SEQ ID NO: 527 - DNA, 554 bp, Homo sapiens
  Genbank Accession No. AI590093
tttttttttagactgaattgaatgtctttaatttcacacaatgaataacatatgaataggattaactttttttttttaatagttaagtgctctatactgtgctaacctgatctggtagcggaaaagactgagctttcttttagaaaaaaatgtttaaaacccaacatctaagaccatggaggagcatgacagtaagcatgctagatgtatctacgcctcaaataacagcaagtccatgttcattttaaatgtacaaaaatgctttatgaataaaaactgttacaaaaagaacatttcaaacaatgtacaattttcttgcctctatattcaataaaatacaaatacattttttgttctaaaatatgtttacatacaatcaaagtagaacatgcaaattacactttaaaaaaggcttttaaaaaccacttatgaatacaaactaaaaattagccagcacgacttgtaagacaatcttgtgccccattttttcttttgaaatatatatgtacatatttaacacatcatgtgcatttattattatttaagaaatagat

SEQ ID NO: 528 - DNA, 556 bp, Homo sapiens
  Genbank Accession No. AI590385
  misc_feature (1)..(556): n = a or c or g or t
tttttttttttttttttttttttttttttttttttttttttttttttggctgcttgggggaacatggagtttattcagggggggggacaggcgggcggctcaaaaacaggggccccccacctccgccatgacaacaaacacattgacatgggggggtttaccccccaagcggtcaatggtcttttgtgtaaaggccaacggaagggcctcggggcccaccatgcaggaaaaggggtccccctttttccaatcctcggttgccacccccaatatgctggtcacaacaaaggggggggtgccctggctgggctcctgccgggatgcccaaataaggtacttttcggggggcaattcctgtgacccctgcaaccagcaaaccaacacgtccttggggctgaaaccgggtgccaggcacgtaagngtaaccaacttgttaaaggccagctcctccgacgggggggggagcaggtggacctcgggcccgaatgtgttccggattttgagaggggggcgggtaacggggtctttgactcgggtaggcaccaaagcaaggaag

SEQ ID NO: 529 - DNA, 528 bp, Homo sapiens
  Genbank Accession No. AI598252
  misc_feature (1)..(528): n = a or c or g or t
catccagtaacctgtatttacatgcaaatatattggtttatgcaaaacagcggaggcctcgggggagggttttttagtctcaagcttgtgcagtcattgaaaaagagacgcaaagctgtctctggggtactccacgtccgccttgcccctgggagctgggccggttccaggaggacgaagactgaattagctcggcttgcagagaaaggcgagcagcgcccctacacggagagtagcggtgcgcctacaaagtcgcgcatgcccactccggcctcccgctccactcctaaggcaggcggcgaggcttagtgcgcaagcgccattcgtcggcgccgactcctcccgctaaggcgggaacacgcggggcccaagatggcggccagccggtaccggcgttttcttaagctctgtgaggaatggccagtggacgagaccaaacggggccgggacttgngcgcttacctgcgacagcgggtagcacaggcctttcgggagggagagaatacccaggtgaccggcggggaggcg

SEQ ID NO: 530 - DNA, 471 bp, Homo sapiens
  Genbank Accession No. AI601149
atacaggatatatatttattaacagtgaaaaagcatttatccaaagtcaatgttacaaaatacaaagagtacctccacagtctggccagctcattattttaggcattatctcaacctgcataaagttctctctcactcattttgaacttttctccctctatctatctgtaaccaaaatttttaacttcaaaattaggacaaataggaatactgaatgcctaacccttcagcaatagttactagagaaaacagattaaataaatatatctgctctcaaaccctacgtattttaaaactaaattatctactaaaatagaaaaacaatagacttagattaatagcagctgtaacaccagtcaaataagcaattttgataaggttcataggtactatggtaataactaagatataaatacaatttttccactttaatatgcatgcagacagagagagaaacacagtatgtaaggc

SEQ ID NO: 531 - DNA, 474 bp, Homo sapiens
  Genbank Accession No. AI610692
tttttttttttttttttttttttttttttggaaaaccaaacatgctttatttcatttttttcacaatttatttaaacatctcacatatacaaaataggtacaatttaatttttctgcttgcccaaaaaacaaagcttttgtggaaccatggaaaaagatgaaaatgagactggcaaagaacaaatgctgaatctgaagaagatttgggcaaataatctgcatacttttaattgggaataagatggaaaatatgaatgctaaatcaaattttttaaaaaatacaccacacgatacaactcaatacaggagtatttcttctcaaattcttctagcaccatcaacattcttcaagtatctgaaatactattaattagcacctttgtattatgaacaaaacaaaacaaggacctcagttcatctctgtctaggtcagcacctaacaatgtgatcacactcatgggaaatgttttgagg

SEQ ID NO: 532 - DNA, 571 bp, Homo sapiens
  Genbank Accession No. AI610837
  misc_feature (1)..(571): n = a or c or g or t
tttttttttttttttttttttttttttttttttttccgcatccaactaaaaggcttttatggacaatgtctgggaacaataaccaaacaaggcttaaatttttcattcaaattcactttccacatgtcaaaagacctcagggtaaaaaaaaataaaataaaaatataaatatctgagaatccatcttaataaataaattaaaaccccaataaaacgttttcatggaaaactgttaatgtcagaacattcaaaccacctcaccaaggcttgatcagtaccattacaatgaacattgatgttgaaaaaaaactacacgccagggatatagctatttatttctatctaccaaaaaataaagncggatcttttcttagtataatatgggtcatttctaatcagaacacactatggccaggaacacagtggttatggttaaaatcagctgcactagatacaatntgaaaatatccagcaccaggttaattccaataatgaaccccatagattagttaatgctttgagaggactaaggagaaagagaaaagagcacagacccaggcctgctcaacat

SEQ ID NO: 533 - DNA, 418 bp, Homo sapiens
  Genbank Accession No. AI613455
  misc_feature (1)..(418): n = a or c or g or t
tacatgcatatgccttttaatattaagatttcattttccaagcatttccaccaatttgcttacataggaaaataacagtatagtttngggggaggaagggtgggttacggnccttactactaacaaacaaacaaacaccacttgatttgcacttcttcactgttgtgcccagtgattgataacggggcacaggccagtatggatggcatgtccactgtgctgtagtccagacacctttgtttgtttgttttagttccttcaacctcttcctgctttgactgactgactttttgcagctctgttgcaaaattcaccatctttcctttcttctgtttggctgtttgttggactatagtggaggtgtgactaagcattgaagaggctgaatgcaacaggaaaatgggaaagagaagtgcag

SEQ ID NO: 534 - DNA, 652 bp, Homo sapiens
  Genbank Accession No. AI620381
  misc_feature (1)..(652): n = a or c or g or t
ttttttttttaaaccacaaatacgtttattcctctaaaaacaggataccatctttccaattttcaaaatgttattatcaattgtctgcagattactctcattaagctgatttttaaaaatctcagacagagcagagcaattcaccagcaccatcatcaagtgagctacaaatctatcttttaccagagcaaggagacacttaagatcaattcaagagaatagctttcagtggtcacagaaggggtactcacattcatttgtcacatatttcaggccctcatacaccccttttaaattgtctaactcctatcccagtttctttttatagtctaaaaacaaggaatcacccaagtaagatactccttcagagcactgctgaaaatggatcaaacgtggagatcccccagatccctgttctcaagtgttaaaaatattttatattagcacatagaatacccttagatatattcttgtatgttctaaagagtttggtttccccctttttggatatgtcctcaatttcttctgagacctttcctggatagnccatggggtctattgcttttaacctctcttgatactccagcggcaaaacattttcttttgcacccatgcaaaaaatttttttatctgtggggggaaggggaggact

SEQ ID NO: 535 - DNA, 432 bp, Homo sapiens
  Genbank Accession No. AI624103
ttttataatcatagaacagtcatgtttgcattttattataatacaaccaaaatatacatttaacaatttttaattatttcatactacaagactacatttcttttaaaatagcagaattataaattcaaaattgattgctaaccactcacaataccagaattaaattacatgattaactagggcatctgacacattttgccctttcccaaaaatcatctatctcaaaccctttccataaatactttatactataaaatatttaaatgagaggtataagtcatgtgtatgatcctgtctttgcactcctaatgtatggaatctgggaatcgattttattttacctgacttgtaagatgaattatttaaaattgtgatcatttactatgataaaaatacatctcctataaaaacacttcaaatatcttttttttt

SEQ ID NO: 536 - DNA, 601 bp, Homo sapiens
  Genbank Accession No. AI624853
aatattatggaattatttattttctttggtgtgataatgttggttcttattcttaggaggtgtgtgatgaagtatttagtggtctagtatcatgggtcttgcaacttactttagaatgactcagtcaaaaatcttaatctggacccttttcataagatggtgccaagaacgaagaaggaagctcctgcccctcctaaagccgaagccaaagcgaaggctttgcaaggccaagaaggcagtgttgaaagatgtccacagccacaaaaaaaacaagatccacatgtcacccaccttccggcggcccaagacactgtgactccggaggcagcccaaatatccttggaagagcacccccaggagaaataagcttgaccaccatgttatcatcaagtttccgctgaccactgagtaggctgagctcttcttccttcacatcacagcagcgaccacagcttcagtgaccacagctccaaggacaaccaaggcagcaacgatgcccaccatggggatggggggccttggagactgctccattcttaagattgagggctgggcagcccctcctgctgcccttggcatgtgtatcttgttcctttccaga

SEQ ID NO: 537 - DNA, 462 bp, Homo sapiens
  Genbank Accession No. AI631301
ttgattcaagggcagaaatatttattttaagataatgtaagaatgtaagacaggttgctttgcaatttataataagaacagtaagttggaacttaagctaaataaattgcttattatgaaatgattctgagaagtaccataaactgtttatcatgtatgctttctgtaaaaagtttaatatgaattttatgtataacttaatttttccaaagaacagtttatagaaggaaacactgacaataacagcatacatgtagtcagtacattattattttcaaaccactagcaaattttaaattgatataagtaacaattcagtgagatatttttatctctcattttatagatgataaaattcaagagtgataatatgatggaaatcactgtaatttactttcttttctattttatcagaacatttatttattcacattttaatattatgttgcagccttacaaatg

SEQ ID NO: 538 - DNA, 491 bp, Homo sapiens
  Genbank Accession No. AI631850
  misc_feature (1)..(491): n = a or c or g or t
ttttttttcgcttcacaccgtttttattgaccgatcgcagcccagcaagattgatcgagctggaatgggaagggacttctcctcccccaggcccagctcgccagggcctcgggccgtgctgcagtttctggcctttggtgtcgctccccgccccccagccccgcaaaatcccggcttcttttctgtctgcgcggccgggaccgcccaggcaggcgccggggctccggggctccggggggagggactcggcggctcggctcggctccgcttctttctcctgcctgcaaatatttgctgcctcgctggaaatccgacgatttcgcgcgcgctctgcttgcaaagtctttaagtaaacacgctcaaatgaccgccccgggcggcccgaggcacgctctctccccctccgcgggattagtaactttaggacttcgaccccggggctccgctttgcctgttacccaggtcgggcagcgcgcgggcgcccggngccg

SEQ ID NO: 539 - DNA, 721 bp, Homo sapiens
  Genbank Accession No. AI632223
  misc_feature (1)..(721): n = a or c or g or t
ttccacttgatgtccttttatttgacttgttaccattagtactctcctgggatcaaggctgccaagcctgacctatacccagatttcccagtgcactcaggagatcgtcggtggccttgatgaagccagtgctttttgggaaaaacggagcaaggcaacgcacgacagaagcggtgcaccaaggagtaaagattcagttccatgggccccacttgctgtttgagaaaatgtcctgcttccttcctagctgacttgactcccagcagtaacaggtgggagtgaggacgcagggtcggcactcgagtcgactgctctggctccaggcgtattttctgaaactggactctgccagcccttagcttgtcaagttagcctggccagagtctggggccgactgttccactgggccgtcgactatgacactctgctgtccatgggccactatgcacccctccactgtccttaggatggtttggagccttcgatccagggcaaggaggtggggtcagtgaggacagggctgagctggtcttccagcagtgattctcgcatcacatccgctgagtctgtagtcagctttngccagcagcctgagggngcaaaagtgttttctttttatcatgccacactgggagagaagcgagaggattgggatttcatccatgggagtgcgtcccaacccctctgggcgtggcaagtgaataaggaacccatcaatctc

SEQ ID NO: 540 - DNA, 589 bp, Homo sapiens
  Genbank Accession No. AI634852
tttttcatattcttagatttttacatttttattttaaaacagagaatttcatattgattaacacctactactaaacagaatgatgcattaattaaatgccttgtcctaactgttataagctctgttagaaaaataaacatctcaccacaaactacagtgtcagctctttaataaatacataaaacagaagttagtagtcaatcagagttatatgaacaggttcatagtatattatgtgaaagtatcatattctccaatattctgtatcatttaagacaatttaagttacgtataattcaaagccagaaataataagaaatatgttcagtgataatttgcttctttcttagagctattttatattcaaatatttaatttaaaaatatattctatattaaatttatttttacaaacgcagtattcgttaggtgaaacaaaataagtttttatgttactgataagtttaatacatttctaatttttttcagaagttcaagaaaccataatgaagtagctaatgtaaaatagtttaaaagctatgttaaatatacacaaaatgaatttctatattaatatgtgcaaatgtata

SEQ ID NO: 541 - DNA, 535 bp, Homo sapiens
  Genbank Accession No. AI635774
tttttttttaagaatactcattataggtttaattaatcacaatgatggatatctttaacattaggcaataattgacagttttatagtggtgagactatcatcacccaaaatacaatttttaaaggtcatattcacttttcctttcaacatcataaaatcttgaatgaccacaagtagagctcaacagagaataatcaggcaaaaaatcaggaatgttcatcatcgaaggtttgactatgtcctcggttgatactcataaatttaaatatggtaggtagaaaagaaataacacacagatttgtcaaccatatgtaacagaatagttcagttcagcaaggggaattcagaattctttctctgctggctgagcctgtatgtcagccaacaacatccacttagtctcaggtgacaacagtgccagttaattagcttttgtttatgttttgactattgatagacttaaattatattcatattattatgcaaaacaaacacatagaaagtcttgcctttgatctaaatacaggcacttctt

SEQ ID NO: 542 - DNA, 547 bp, Homo sapiens
  Genbank Accession No. AI638295
ttttttttttttttttttttccatttaaacatttttataatttgtttcattttcaaggcacaaagagtttatgtcaatcattttaatgtctaaaaatacaaagttagcactagtaacatctggtagtctaatcatttatcatgcttaaatgtaacattacaaaactacattttaaaatctgccccctaaccagatgtgaaacaacgtggacaagggtgacatgtgctaaacccaatctccaaaaacgtatggttgacaaagacagctgactgctggggtaaaactgcagcagtcataatcgaagagcgaaagaggccactctattaaagactttgtttcttttgctagacatttttcacctaatcccaggatagtttctgttaatgcatcttactctctttcaaacgaatcgtccctagagcaggtgtacacattaaaaatgagctttatagcatcaaacacataccacaaccaactctacaaggagggttttctgtaagatgtgtacgactgtccgaagaacacattctggctgataagtctcagc

SEQ ID NO: 543 - DNA, 451 bp, Homo sapiens
  Genbank Accession No. AI640222
  misc_feature (1)..(451): n = a or c or g or t
ataacaatcatccccctaccttttctttggtttgggctcgatagtgttttccccaaccccaacatactttaaaagtctgtgaaaggtcagtttcttagcacaggtcactccttgctcccccacctgaaagattcctttcaggacctgtcttcccccactggtccttccctcctctttagctactggcctctttattgatgcttcaaattaattttctatcaggtggagggggnngggggggggggngggggggggggnnggggggggggggggnggggnggggggggggnggggggggggggggggnngggggggggggggggnngggggggnngnnngggggnggggngnnngggggggggggggggggggggggggngggnnggggggggggggggggggngggggnggggngnggngggggggnggggggggggnngnnggnggggng

SEQ ID NO: 544 - DNA, 471 bp, Homo sapiens
  Genbank Accession No. AI640524
  misc_feature (1)..(471): n = a or c or g or t
tgacattttcacagggtgtgttttcatttgcctttggcactaatgggtctctggaacgttccatcctggccggggaggtcagggcctgggcggccagggcccatttcgagaaagcaggttttcctttgtggcatgcttatttcaagcaccattttccctcctggttatacttgaaatggggctcggtgttgggaggtttcaaatgtggacattccgggcaaggagcctcatgaactctgtggacattcaaggggcctcatgaactctgtggacattctgggcaaggggcctcatgaactctgaaggttgagcttggaaggacggacacaggtcttggcagcctgagtgggtacaaacgctgatttttctggagtcagtcctctcctgctgatgggctgagagagccccccaggccctgtgtcccttctcagaggacctcangcccccagtgcctggaacacggatgggctg

SEQ ID NO: 545 - DNA, 506 bp, Homo sapiens
  Genbank Accession No. AI650341
  misc_feature (1)..(506): n = a or c or g or t
caataaattgctacaaataaggttctaaaatcaatacataaggcaaaattggcttttaaacattccttacactgcccacacacttgaatacacctacacaacacagtgaaggggcactggggagaaggactggctgagggcccagcaatcacttcccgtctcaggctgggtccaggtcagcacccagggaatgggaggggtctggattgtctgtgcctttaaaaacttttgttttgtttttaatcctcagttgaatttgttcgctttatgcatccctgatctcacatcaccatatacccaaacactgatacaattaatagatggtggtaatttttattcccttctctgcaatttcagcatattctttttctttttggtncttttttttttttttttttttttttttttttgagacagggtcttgcccaggctggagtgcagtggcacgaacagcttattgtagcctccgtaaggctgtagcttcaatctcccaggctcaagcaatc

SEQ ID NO: 546 - DNA, 390 bp, Homo sapiens
  Genbank Accession No. AI650514
ttgctgttacaaaggcgtttagtttattctcatcagtatcactgatattctcatggttcacatttgccaacgccgctcctctccttacagtagttaaatgtgcaatctcacttgggggcccagggaggggtgggggctcggcccagggtggggagggcgttggcacttcacgtggacagggtgggcagcctgtcctgcgtgaaagaggtgtgggttgagtgggcggccagggaaggggagttggcaggggagggccccacagtcttttttctctggtggttggtgattctccattcagattccttcctgcccaagtgtaatccccataggatgccgtgggtgaacgaaaggccaggacggctcccaccctgcccttccccagaagccgat

SEQ ID NO: 547 - DNA, 657 bp, Homo sapiens
  Genbank Accession No. AI651024
  misc_feature (1)..(657): n = a or c or g or t
ttgcctgactctttgggtgactttactaatattttgtattgcctttatcacaggtttgctatcacccctatgtttgagaggaagaataattttaaaatttatgtatttgttaactaaatttacaaaatatacctgatgttaattttaaatgatctttaaaattaaacatactattaattattacataaaacatgagtttataggagatcaacaaaaaattactaggtttgaggttttaaggttcatctgaatgagggaggagtttccatctcattgttgtatcaatttcttcatcaaaatttcctacttcctgttctttagaaagctctaagaataccttctccagtgtgcactgagaaaggctgtattcttccaggttaaagttatgcttcactgcttctaatttgtgaaaggtctgtgatagagggntaacgtctgccacgggcagcttataggttaacaaagaggaatacctttcctgccctgcagcctgtgggaaaagcttcagaatctcagtgtggaccaaagtcactttgagacgttnntcacttttagctcttagaatgtatcnncttgcaagttngttttttcagtgtggatggagccaatgcatctaagcctttcagacaccatgattgccacacngtcacacaaagg

SEQ ID NO: 548 - DNA, 609 bp, Homo sapiens
  Genbank Accession No. AI651212
ttttgtacagatcctttttattcagatttatataggcaatttaccaacacagaaaaccagtctagcagctccaaagtaactgtaaaaacggtggtgctgacggtggtgtgccccacacagggcaggtgacctcagacgtggagcagcatctcccgtgggatactatttcagacgtgcactagtgagtgtatactgagaagggattataaaccttccctggcacaacagatacaaaaagagatagaaccaatgatattttgtctaggtacaatatctagatttacagtatctagtttactggcttcacttcgtatagcaatgcacaatagaaaacggatttctttcttcaagggtattcaagaatatagtaaatatgttactatattgatggctatgaaaacagacagagacaaatgagtgaggaggcacgttctctcacagagacaggacttcattctatttcacataaatcattaagggtccattcaaatataagacctctcacaaagtttcagtcatgtatgagggcgcttacctttaagaccccatttcaaaaccattttgaaatagtgaaggggggaaaaagtcacactcaaatgtgctactctt

SEQ ID NO: 549 - DNA, 587 bp, Homo sapiens
  Genbank Accession No. AI651535
ttacattaaatgtttttattgaacaaaaaaagataaaacatggaagttgaatttactgagcaaaagcagctctccaggtgaagctgctatactttgtgctaaataaccttatgaactgagtatacagaatacatataatatgcaagttacctcaacagcaaaggagaaggagtagaatacagtttttgaagataaaatctggtcaagtgacaaattttgttgctcaaaatttctagcccttatccacctaaattctgtatggttctacatatatgcattcagtatgtgcatactgaattcccattttaatggaagctgctttttggaagaattctttttaatttcacatttctttgatgtgccactcaatttttaaaaaaattatatttgacatatgtgcatgtgtgtatgtgtatgtatgtatacacactttaaaaacaccaaacccttgtttataagtagagggttcatgctgctttttaaattaatattagtgaatttaagctacttctcctgtgtgtctaggaaactttgtgttctcaatgcacccacacagtcaagtgggttgacagatatgtcaaaaatac

SEQ ID NO: 550 - DNA, 502 bp, Homo sapiens
  Genbank Accession No. AI651732
tttttttttttttttgaccactccattcatatttatttcacatttgatctgtaaacttttttatttaaaaaaaaatccactgtcattagcaacatgtgctgacattagtttttctttagtgaaataagagtgcaggccttaaattgtctctgtctaaaacatgtagaaatgcagatgtaaacacaaagtctctgccctcctccccttgacttttggcagttcatcaatgacatgatctcaaccagaaaagcacggaggggggaaaggacaacattttgatacctaacagctcttggggaagaaactgtacagtttggcaggcccatttgtcttttcaaactgtttaccttgggcaaattgtatcaggtttgcttcttccacataatttccactccttggagtctaaaaacagcagctaaaagatttccccatagtcagcactttcggggcaggaggggcacacagacatacaagatagaaacatacatattcttcttcaagc

SEQ ID NO: 551 - DNA, 530 bp, Homo sapiens
  Genbank Accession No. AI652058
  misc_feature (1)..(530): n = a or c or g or t
ttttagtggctgggtgaccccaggcaattttattactttatccctgaacctcagttgcctcatctataagatggggctaataatagcacccatttcataattatgaagattaaatacattaaggaaaacactagtatgtccctagtacctgctaaacactcaacaaaagttaactgtacatactgatgtctcaaacagggacggaatgtttaacacagaaaacaggaggttttagcactcactcgttctcctggctcccgaaatatgagctgccctgccccagttcatccaagcccatcaatatagttgtcctcgtccttaatctccacaggtgttcaatgtgagccaactgtcagatggctttcatttgcacaactgaataaaccatttatgcctagtgttccattactggaacgctaagcttatgggagttatttatatcttactgctcgaggtcctcaccaagatctgattntttcacaaaaaaaatttgtaatctccagcataaatggaataatcaaagcaattgt

SEQ ID NO: 552 - DNA, 591 bp, Homo sapiens
  Genbank Accession No. AI652459
  misc_feature (1)..(591): n = a or c or g or t
tttttttcttataaaagtgaatgttttaataaagattccactatatttacacatttatttttctgataaaaaattacaaatttaaaaattggaaactatggacaagtataaagaaaagcttaaattccccatatgcctgtcttagcattgtgatatacttatttttatcccccagacatatttatataaatttatttatgcaagcaaacatccattctgtatacacggtttattctgccaagctttactgtctcttaaaccctttctaaatatcattacatatccctaaaaacctatggtttcttttttaacagacacacagcagtgctccaccagatggatatacagcaattcaatcacgttcctctggacggccactggcttccagtgccgggaggaacactcaggtgggaggctctggcagtgactggggtgggcagcctgatgccaacctctaaggccctggcagccacacctccctgccactgccaggcaagcctgngctactattttaatttactctttgcttgtctggtagggaaaacagcatgtattttaattcgcattttaactactaacaacattataatt

SEQ ID NO: 553 - DNA, 448 bp, Homo sapiens
  Genbank Accession No. AI653441
gttcttgtttgttttctttcttttttttctctttctttagttcacagatctagtaagttaccctcagtttgttttaaaaagtgaacaaagtccatgtaaacatgttcccagggccaggcacggtgtctcgtgcctgtaatcccagccatttgtgaggccgagacaggcaggtcacttgaggtcagcagttcgagaccagcccggccaacatggtggaacccccatctcgcaagggtccgtggcttcattcttgaagtcagtgagaccaagaaccccccaattccggatacagtgccactgcactccagcccaggcaacagagcgagattctgtctggacgtagccccatttctcttcccggacaggtcctctgatagtcgggtaggttctcaatcaagcctctcattagttatttggtctgtcaatccatttcattcctgcagtcttc

SEQ ID NO: 554 - DNA, 306 bp, Homo sapiens
  Genbank Accession No. AI653487
ttttttttttttttttttttcgttaaactcaaactgggtctatgtgacaaaaagggaaaaatagagttaattgtctgaatgttttcaaatatacagatgctctagcactgggtagacacagggaccctgtacctgccccaggcacttttttcctgcagatgttctggcatgtgcagagaaggcctcaggttgggggaaatctggaggatgtttcttgagctaaagttgcgtacatattgcccattatttatccaatacaggaaatcagtttccatcaaaatacaattctagagggaaatttctcat

SEQ ID NO: 555 - DNA, 805 bp, Homo sapiens
  Genbank Accession No. AI654035
  misc_feature (1)..(805): n = a or c or g or t
gcggccgcgggcagccccggtggcccgcagcccgggcccatgctcggctgcttgaggtccgacgtggcgatctcggccagcgaccacagcttgggcttgctggcggggggcggcgcgcccggagacgtccggctgccctggggcgtcttgcggccaccgcggggcgcggcctcgggcggggggctcagcagcggcgcctccaagccggtaagcggcgacgaggtcacgggcttgggcggcgccaggccccgctcgccctcctcgtcgtcgtcctcgtcgtcctccaggtcgtcatacttgtccttgcactccgagcccgattcgcacagggggtccccggcgcggcacggaagcttctccccgtccgactcggccgagcacgagtgatccgtgagcgagtccacgtgcaggctgatcccttcgtcctctgccgaggtctccgtgccctcctgcgccttgtcgggactctcgtccttgcttctggtagcgtcgccctcgtcctcgtcctcatcttcgcttttgtttctcggggcccaggtcatcttgttctccttcttgaggcgccggcgcgcgttggcgaaccaggtggagacctgggtgagggtcatcttggtgatgatggctagcatgatcttctcgcccttggtgggnggtaggtcctgcngtgctcgntgagccaggccttgagagtggccgtggcgttccgcgtggcgttcttgccgtacgccggggtcgtgagctggtacgggtatgccgcgctgccgtaccggtggtagctgatggcgcccgtcatgcccgtggtgtg

SEQ ID NO: 556 - DNA, 578 bp, Homo sapiens
  Genbank Accession No. AI655499
  misc_feature (1)..(578): n = a or c or g or t
caaggattacgaaattcttctgtcttagttacaaacaaaatgcagctatgaagcactgggaagtaaatgcaaaatatagaaagaatcttcatgattctcccaaactgtaagcacagctcacaaagtctcattgctttagaatgttttctggatgaacaagttaccagctgcaaaccgacttcagaagtgaggaaaatgttttctcatgtttcatgtagctgtcaaattttcaaaaatcctccatccttcaatcacccagtggggaaaatgtgttataaaacactgccccctggagtattctgggaggaatgtcttaaaaaaaaaaaaaaaacagcaaggagaaagtactttcaaattctttactaaccactaacagaatttctaagaagcaaaagaaaaccacagaaaggaaatgtacatgaataaagttgagcaggatgtgtacaactttaaactgtattgtattcatgttgctaaacaatattggccttctcgatgattntattcatgttgctccaaagttaaccctgtagaactaagtaggtgaagagatattttgtataagtgccacagaagag

SEQ ID NO: 557 - DNA, 806 bp, Homo sapiens
  Genbank Accession No. AI655781
  misc_feature (1)..(806): n = a or c or g or t
gttcttctataccatttaattaaatatgagatggttattacatacattgtacgcttatatactaagcagctctgcgaaatgtttgtaatgcatgtggatagtacacggttaaatcagagatcttcactgtagtgaacaatggatattttaaagaatagtcccaacaataaaccacagagctgacaaaaatgccacctaatctgcatcatttccaggagctctgccacatattcttcctggcccgtaccaagtctcttagcccctctagaagagctaagaaaatgcaggtgtgcacctctgaacagcccatacttggcttttctgtgctgtgagggagactaggaactctagacttcccttttaaatcatctttgtcgctcacggtaagttcagtctgggtttcttacacttcactggttttggtagaagctggacatggtgacatatgcttcttcttgatttgatcccagggaagtaagaatgggctgaccctgagcaactgggttcaatgtcaggattccagattggagagaaaatggagggggcagcgtgctgtttgtagtcccaaagctaaacaggaggtcctggtacacatgaagcccattcttgccactctccctgcagtctanggaccctgaagaggagaggaatagggcgtcacatgcactgacattcccagccaggcatgtgaaggatgaatctcttccaaagctttctggagtgatgactacattctcagatgggcagttggggcttctgaccatcccctccaagctctgcttctagattcttttattgttgaggaa

SEQ ID NO: 558 - DNA, 525 bp, Homo sapiens
  Genbank Accession No. AI656062
tttttttttttttggcaaaagatttagttgttgattatataaaaatgcccaacatgggtcacattgcaaaagtaaaaccccaaagtgtaacaatgaaaacacaaacatttgtacagaaggtatacagggtattcgtttccctaaagtatgaagacattttgtttctttttcaaatacttaaatattttatgaaatctggcaatgatcttaagactgttgacatacttccactgggaaatcatccatttcacttatttttaaaagtttcattttataccagagttaaatgtaaactaatgaaatatttattgatattttcataatgaagactctaaacatttacacatcgatatatagtacaaaaattatacaaattaaagaaagggggtaaagtcggtaaagtagtaatagatctattttgcttcctgtaaatattttttacgaacctatacggtgtcctttctaaaaagataaactctaattagctagcaagtttgtgctaataaaataggattatacctcttg

SEQ ID NO: 559 - DNA, 531 bp, Homo sapiens
  Genbank Accession No. AI656807
  misc_feature (1)..(531): n = a or c or g or t
tgagttnatacctttaaaatttattacataagctatacacacaaaatgaaatcctagttataaaagatgcatctagaagaataatttataataaaccaacaaaaatgagaatgtgtatctccaggaatataaatatatttaaatgttctcagtgactggcattgctttatgcattacataagatagtatgtactaattaaggtattgaattcactgggttttagaaggctttaaaaaaaatccagataaatcaacaacaaaaatacagctcaactttgaactgcattaaaatccagaatctctcattttagatgaccattccttattcccctcaaaaggtttccaacagaagctatttcacaaactgattattagaatgtcttctccccactctccccaaaagcaagtatgcatggaagtgcatgcttttaaccttaagaaatgtatttttggtaccattaatataaaattataatatttatatttataaaattgtatataaaaagtatcaatagactataacctaaacag

SEQ ID NO: 560 - DNA, 1085 bp, Homo sapiens
  Genbank Accession No. AI656836
  misc_feature (1)..(1085): n = a or c or g or t
gatgcaataatagtttattatgatatagtttatgtaaagttaggtaatatttacaaaataaaaatgatcagctacatccagggaatctagcatgtcacacaaaggaataaatattctgacaaagtaacacttcaattgtagtgaatcgttgatcacaaactaactttgtaaaaaaaaaaaagcctcaagacgcccctcccccccccccccccaaaaaaaaagcagcagctcagctggtcaggctttcttgagacactggcctgacagtggatggcccaccctaccccggggctctacttcttagacccgagcgctgtgctggaacctagggaggcggtactcattcagccctttcttctgcacacagcttttagtctgtttgttaagcgttaccacttagcattagaacagaaatgaaacaccagttggaattatacaagctgcttcttttcatcatgtgacagaaggtttgtgagaactgctggaatcacaagctgcggcagaggtgactgaagcatttccactccgttcacatatagcgccccagcttggcacagtaggttttgcctttgataacgaattttgacactgaccctgacagaagggcacagctgtgagaaaaatcattaagaattgtaattgttgaggagccacttggatgcttctacttttnttaattgtaccctagaaaccacatgaagaaatcttatcttaactggtttgaatctaacagttgtcagagaacgttgttatactaaagggaatcctaaatccttaaaaacatttaattgagctggggattaaagtaacacaggagaactgggggttttacaacttttctctcgtttttaaactaggttgcccccttatcttcaagccaggggggcagaagtatggctaaccaaactgaaccctctgtgggtgtgccccaaaactcttcataagggcaactgccggggagaccacatacgtgtccggaaaagggtaccctctgtctggcctcccgccctacactgaggncatattaatcttggatgtttttccaccccaaaggggcaaaaaagtttcttcccccccgccccaac

SEQ ID NO: 561 - DNA, 503 bp, Homo sapiens
  Genbank Accession No. AI658662
aaaattaaatttctctttattcaattgcctctgagtagtgctgtgatttccaagtgccaggtagttaggtgtacaaatatacataccacagaaacatacagtttttaaaaaaattaagaaactggctgcatctgacgacatcaagaaaaaagataattctgattcaagggcttctccagaagatggggtttcattggcatgacgctcataggatgacctgtcatttttgtactattttttctagaaccatagagggatgacagtaactggcttcttagagcatttttgcctggtgtctggatcctgtgggaatttattagcctgctttgtggcccttggccaaccctggtaggacatctagagaagaattcaattctgctttttcccagaataattgttgactaactcggcaacaccaaagtgtcacaggcatctttgtgtcccccagagtccaatgatatgtggacccaagaccagcgagggtcatgtttctgggaatacag

SEQ ID NO: 562 - DNA, 392 bp, Homo sapiens
  Genbank Accession No. AI658925
ttttggttcacttggtttgcatgatgaaggaggtaagaagtttcaggttatgtaaacttattcaacatcagttttacaatctgtaaggtggaaagtcatgggtgtttaacttctcaatttaaaagctggaatcaagggctaacggaacttacatacctaaaaccatgtatcccatgccccatttcatagatgaggaagtagagatgccagcagacagcacaacttccttacgcctgttaatggcaaagctggcacttgaacccacatctccactttccccacttttccatacccctaagcactcaatacatgctgagaatcatgaggctgaagaaatgatcttgttcagcatcctttttaaaacttctccgatatgtattgcccacagtaaa

SEQ ID NO: 563 - DNA, 530 bp, Homo sapiens
  Genbank Accession No. AI658928
  misc_feature (1)..(530): n = a or c or g or t
tttttttttttggggtacaatgaattgaaacatttattgagcatcagtttataagttctttaaggaagaaaggagcaagcgagagaaaagagtcattttgccattttatccatttattatgtacaatattaaggcacaagtttaagcagcaaaggagaggaaaatctttggctgaccaacagcatcaatatttgctgtgggggacaggcagtgttcttggaatccccacactggtacacagacccatttggctgtatggccatgtacatcacccctcaatacagactggcaatatgaagacgtcaaacgttacagccagataccagtctgctgggaagagccggcacgagcacggcacactgccaccaagcacagcgacacacacacacagagcaggttggagggcagcggcagcaggacagctgaaatcgggtgcccatgcttaccactgtttcacagaattttacacaattctgtaagtgctcatggaggaggaggctccctgttcctcctcanaaggaaaaaaaaca

SEQ ID NO: 564 - DNA, 412 bp, Homo sapiens
  Genbank Accession No. AI659076
tttttttttttttttttttatctgtatgaaatattagttttaataaaacagaaccagtccatgtatggaggcatgggcataaggtcaacttgcactaaatgtaactcgtacattttttctaaaataatttcttgagcattgggggggccttatgtactaacccgaagctgaacttcctgggaagctgatccaatggagcacttggaattcaggggtggagtcttcttcctgggtcaaagctggttcagggtcacatgctcttgaggtccctaaaggccacatgtgctgcatttcgcccagcagctcccatcacacctcctccaggatgagccccacttccacagagatacaggccctggagagggcagcggtagccagaatgcaggggcacggggcgggcgaagtaaagctg

SEQ ID NO: 565 - DNA, 551 bp, Homo sapiens
  Genbank Accession No. AI659418
  misc_feature (1)..(551): n = a or c or g or t
ctgctaatatccaaagtttatcatagctatgacaatatcagtcccaaccaggttacaagtttgttacaaattacaaactacttaaaaacagttttgaaaaaaaatatatcccaaatattaacactaaacactaccctggagttagaaaaactgtaaatgggatgaggaaactgaggtaccagtggtgacataaggcctttttgtctgacagactgttttctgaagtcagtgtaggatgtagtctaacagacctccagaagaataattcttccaactaccaaatcagcacactgagacattaaaatactcaaatcagaataaggaccgaccctaagtttaaatgtgtatttggattaacatttttcagcaggagtgtatgaagaggggagaggatacaagtcaaagactgggtagtcaggccccctgtcccttgcagaatcccttacactcaccaaacagaatattaaagcaagagctacccaataagaagagactaaagaccccaactcactccttttgtgttgggcagaagaacctgngctgtgagtcaa

SEQ ID NO: 566 - DNA, 654 bp, Homo sapiens
  Genbank Accession No. AI659533
ttatacttccaagcaaaatttattagatgtctattcaagaaaaacacaatgacctttgcttgtaagaattcaaagtcaattacctggaagccaggtatgaatagttttttcttttaaaatcagatacagagagtagaaacagtaatttttcttaaatatgacaggcaacagatattgaagtcttttctcataaatggcatcaaagagaattattcatttatcagcaaagctgcatgcagttgacttaatttcaaacctgaagcctttaaaatatgaagctggttatgaccttgacagaaatcaaggtaggctactcaacgatgtttctttaccttcttcctaatgaaattcccttgtcatcagtcagtagatatgtacatttcatttggcttctacgatcttttaacttcatagatttttgcataaatgctatctgacagaatcacactatctaggggtgcttgtgatctgtgagataaggagaggctagtctgctgaaagtgttgtcgcaagataaagaccaaattaggaaacgcccctgttttctcaacaactaaatagtctgtacaaaaaaagagcaaacatatgtacaaaattctagaggctacatacattgtgaaaagatcaatcactgtccatgaaagagatgccata

SEQ ID NO: 567 - DNA, 452 bp, Homo sapiens
  Genbank Accession No. AI659783
  misc_feature (1)..(452): n = a or c or g or t
gcatttggttaatatttaataaatgtttactgactaaatgagattcaaagacttggctaaaaccacactctagattaaagatcagtcaagaatggatgtatctttaatacaccaaaactggggtttctactgaagcaccagtgtcctatgcatatccctaaagaaacactgaataatccgtggaagtcattaaagatgactattaccagaacaattccttttcaagaaaccaactcttactaatcatcttcccactgttttaaattcagagttagcatttactttccatggtacctttaaatatatatgtcaattggccttggctttctgccataaagttttatgtgccatgataaacatggtatttatcaggggggattntgcccttttatttaattatgggtataaaatggcaaagccacctcaaatatgtacatgtattagttctgtga

SEQ ID NO: 568 - DNA, 664 bp, Homo sapiens
  Genbank Accession No. AI659927
gaagcttttatcaactttaattgatataattataattggtatgcaatatgtcttacaacaaatgtggatacaatgacatcaaatatcaaagaattttcccacctttccatctttaaatgacttcagctaacttaccccaagagaaaaatctggcattgatctcttggttagcattattaccaatatcaactagcactattaaaatcaaagttgaaatggtacattcatttgccaaaaaaaaaaaaaagaaaaaaaaggcttaaaggcaaagaaggtgaatcaacgtgcaaattagcatctggcccaattgcaaaattcatttcctggatgtgagggattgaaccatgcacacttgcaagcaagatgaagggcaaacagatgacatcaaatcaaaattaaccccacaaagaatccagaagacctcagatggtaaaggacagaggtctacgtctactgctgttagtgctcaggtatccatcctgttttccctaatctcctgattctgatccaagagtctttgagacctatgtcctaggccatcctttcatctagaaatggaaaccatggctgtggcaccaggcatggtcaaccctgcagtgattcagctgcacaaaagggtagtccagagcttagatagctgtctgatgtggctaggacacaactg

SEQ ID NO: 569 - DNA, 497 bp, Homo sapiens
  Genbank Accession No. AI660245
ttttttttttttttttttttttttttttttttttttcagacttttggcttgtttgaaaccagtaactggaaaaagacactgccggacctgaggattgcacaactccgggaaagtcacctcattccactgataacaaaaccaagcgtcagcaggctttcaacagcccggaactcagctaaaatttgcagacctcaaaaccgccagcagcacgaggacagagtcggggaggtgtagctggacaacagctcatgaggcaaaaaagctgtgtcacaggtgtcagctgagcacaagccctgtctgaggccgtggtgactggcgacagccgggcagtggagggccttggaagctgaagggtggtcttggcatggactctggtccttggggtgcaggctcttgggtcccagttctgctcggggtggtcctgtgaagcactaaactcctagcgggtcatctgggaggttctagcagagctgaacagcccaagggtcatcagggct

SEQ ID NO: 570 - DNA, 522 bp, Homo sapiens
  Genbank Accession No. AI660656
tttattcttatgaatctatttaattgctcagactgggctagagaatacgtaccatgaaatacatatatttcataaggttcagttacaaaatggattgtttcaaatggcaatttcttacactaacctgattatgaaaaaaagaagtctgtatcatctgcttccaagtctgttatgtccaaatatattttaattatgcatttattttgctacttttataaatattagagatttcaccttaaattatttttgtaactagttctagaacatgttttccaattattatttttctaatggagacatataattgacctatgtttatgcatatatgttctctacacagtgaaactttttttaaaaagaatagtaaagaaaatgcggaagctctggctctccaaggcaaagtcaaaaaaaaaaaaaaaagcgggggggaatgcgaggaacattttattacacctcctgattttcactccttgagttttattttctccccttgtttatttgtttaatgctagaaactgtatt

SEQ ID NO: 571 - DNA, 617 bp, Homo sapiens
  Genbank Accession No. AI668620
  misc_feature (1)..(617): n = a or c or g or t
ttaaacatcangtttatatacttttattaatacaggacacacattataagtcacacacaaaaagagataaaataattagataaaataacataagaatttgaatattttcttcttttgcctaagatatattcagcttgccccatgtattttatggccctctttctgctaataacaataacacactaaaaaatacttgctctgagtcatcagatggagtcttccttcaacaaggctcttcaggtcattggtgctatgaaggagaccccatcagactaacagtggatttctcagcagaaatcataaaggccagaaaacagtggaatggcattttcaaaatgctctttccattgcttttccataccactgcttttcccaggactggagacttggtttccagctctttgcacctcctccagcaatgtcttttttgcagatgtgcttggccttaattccatcaacagtgtcctgagactgaggatagataaaatacttcaggtcaaagcagagcctttttttttaaaaaaataatcttttactgggaggtggcaagagacccatttcttcagaattcctgtatggctcatattctgtgtcagggattgtgggaaagacaattc

SEQ ID NO: 572 - DNA, 596 bp, Homo sapiens
  Genbank Accession No. AI669212
tgatgtaacatttgttatttattggaaaaagctggtattaacatatttatagttttattcaacaattgggtaatttgtgagacaccaaagaaaaaaagaatgcacctatgagttacagagtccaaactgatcagggctgacaacttgaccaccatgtatcccacaccaccacccccaccaccaccaccaccaacagcttcgtcctcagagaagagctaaattaaaaacaaaaccaaaaaaaccccaacaacttcacaatgactatgtgaacgcccgtacattcgagagtaccaggaaatgtaagcagagccaggatgcaagtctgtgactattacactggtccttccaccgtttctggttttgtccctcccctcgacaccttttcttaacacacatttgatcttcacaatttgctttggacatcattattttccagggatccagagacatacttttcttcaaagaagatcttttcctttcttttttcttctttttggtttggtacccaaagtttaaaacagaagtaaggaactaggaactgtattaagacctccttttgaaggacatgtaagatttgtactttgaagatggtaaat

SEQ ID NO: 573 - DNA, 798 bp, Homo sapiens
  Genbank Accession No. AI670876
  misc_feature (1)..(798): n = a or c or g or t
gttcttctggatgaaatttctgagatgttactagatgggggatgtgggggtgctaggaggggtgggagaaaagcagaaagcagtacaaatacgagacttcaagcagattcttagagcgactgggaggtaaagacatggagagggtttggtggaggctctgggtgctacgacaaacacacgaacactagccgaactttccaaaacgtctattagtctaaggaggaaatgcagcaaggaaggaacgattctgcctgtgctctgcgagattacagaccctctctggttaatttttttcctttttttcccctacaagcggatggattcgatcttaactttgcatggagaacagaatgctgtgtgtgagtgcgtgggtgagtgagggtttgacacacacaccagccacactcccacccccatctatgagggcacacaccacaccccacatcccggcaccccatttctcatgctttaagtggaagcatcttcgcagcacgaaccacaggtcccttggaaggagagtctgaggtctttgccttttttgcagtcgcattgcatttatactcanggaggaaaaanaaatatatcaccaggcacaaagggaggaggggcngngagaggaangagcgggaaagggangacgagangcccgcgctctcaggtgaaaataaaaattgggaggtcagttcccggatccgattctctcnggtcattttcttgagtttcattctgcgattttgaaaccagattttgacttgtctgtcttgaaggttattgtctttgctatctccangcggcgct

SEQ ID NO: 574 - DNA, 540 bp, Homo sapiens
  Genbank Accession No. AI671836
ttttttttttttttttaggcctttcaattcagtttatttcagtctaatctgattcagggcaattcaactccactcacgtcagcacaagggaagagcgccccggagcccacaatgggcaccaacacacagacagtggcctcaggcagcccggctggaaggagcccactggtctcacaggcgtaacccgtgtttgcaggcataactcgtgcgcacgtgtggcactgctcggcctgggcaccgagcgctccccgtgccttaggtccctccagacatgccccctccaccgcccctcctgaggacgctcatctttgaaaatgtcctaagacggaactggaagctctaaggtacgcgttccaaccatcacgtggcaggggctggtgggcttcacgcagagccccctgtcttctggcctcattcaccatcagtgtagtgggtggggacagctgacccaagggccctactgcatgggtcgcacggttcagccagtccttgctggcgggacctgcatccccatcctactggctggcagagtaggactgg

SEQ ID NO: 575 - DNA, 405 bp, Homo sapiens
  Genbank Accession No. AI671984
tttttggcatgctttttttaaaggcagagattggtgtgtgcttattttctgctcaagatgttgcctataggaactagatatattttggctatgactgaattccagcctttggactcaatcccagcttactttaatagaggctaacaaggcttatgaggggtgagggttaaagaagatggatggataacgagattgttgggataaccaggccaggtcagtcaccttggccttcttgaaggtcagtggcctttttggaggcgagaggagatggagaacacaaacagctggagccttggaggcaaagcaggcacacaatcttgtttggtgtcctttgctatttttctggaacataaaattgttcactttttttttggtagaatatgccaataatattcacaaactctc

SEQ ID NO: 576 - DNA, 554 bp, Homo sapiens
  Genbank Accession No. AI672101
tttcttgtgcaagtggtttattgatggagtgctcttaggagaaggggagtgagggaagcagcgtaggacagaggaaaaaaactgagtaagaatgtgctctcagaagaagactgacttcagcttgattccatgaggagctctgggaaaggaagttccttgatgtaagaggtcagtcttttgtacctccatacaagaggtagcaattcttttctagagatggtctcaaaattagaatacatcaaaatcacttggagggtttggtaaatcagaatgctgtgccaacccccagagattctgattcagtaggtctgaggtggggcctgaggatttgtatttccagcaagttcacaggtaatgctgatgatgcactttgaaaacctccactctagagaagaggacagctctgaggtgttagcacccacagcatctcgcaaaggggatcaggaaagcacctactacatgaaggcacatgccagggacagatggattggaccccaagctggggctatgtagactacatctttaggtcagaacatctagattcacagtatctt

SEQ ID NO: 577 - DNA, 495 bp, Homo sapiens
  Genbank Accession No. AI672356
ttttttttttgatgaaaaataggaggttcacttttattttgctaatccgtcaaaatacattcaagcatggcacaaaaattatattcaacactaggttctgtaccacctgctcccatgaactcttaaatctgaataatgttcagataattttcataggtggaagtggtcaaaacatacaaccaattgtccctcctccccaagtcccacatgccaaaatgtttgcatataaactgacaagaggaacccagaagtgactaaataccactatgcttttttcttcactacaaatagcaattttaagggtagacacatgacaatgaagtgttaatataccatgaacagaacaggttgccttcctaatacacagaaaatccttttacataattcatttgcaaactttagaagccactatattcccatgttgggaataatatgacaaccttattaaactgaaaaccctgagaaaggtgtactattccaattgacccagatctt

SEQ ID NO: 578 - DNA, 587 bp, Homo sapiens
  Genbank Accession No. AI672389
gcagcaatttttgatggagctggaggatattattctaagtgaagcaactcaggaatggaaaaccaaatactgtgtgttctcacttataagtgagagctaacttatgggtacaaaaaggtatacagagtgacataatggacactagagactcaaagtggggagggtaagaggggggcaaggtataaaaaaccacatattgggtacaatgtacactactcaggtgaccggtgcagtaaaatctcagacttcactactgtagaattcatctatatgaccaaaagccatttgtaccccaaagccattgaaattaaaaaaaaaaaaatacacacacacacacacataaagaaaaaaaagaaaattataagaagttaatattgactgacctggaacgaaaaaaccaagacagtatttagtcattaacattttgctatttcatcaatgtaaataattaatttaaatggagaggagtgttcattgtaatcataggagtacatacatgtttagctactaaagaaaaagtaatcagaagcaaattcaatggacttatcagttattattattagacttatcaaagacttatcagactg

SEQ ID NO: 579 - DNA, 428 bp, Homo sapiens
  Genbank Accession No. AI673539
tttcccggtgaatagaggacgtttaatatttctgtgctggtcaaacggaacacaggtggggaatacatggggagggggcggagggccccctgcctctcaggaggggtggcttgtgaggggtgtatgtggggggttcttgggaaatatccaaggagtcttctcagtaaaggggccaggccaggggtgttatgagcatccgatacgcccagtccttggccttgagttgggggtcccccatagggggtctgtggagagtctgacttttttccagctcttttgctagaatccacactcccagcacgacgggtgacttggtcctagagaggggtctggagagcccccaggaagcagcccagggtcagggagaagggctcccgtgcccactcctaggggggtgagagcccgctttctcccctcctttctccttc

SEQ ID NO: 580 - DNA, 472 bp, Homo sapiens
  Genbank Accession No. AI673735
aagtaagacaaggtctcactatgttgcccaggctgccctcaaactcctgggctcaagcagacctcccactttggcctcccaaagtgctgagattataggcatgagctaccagcaccccgccaacattttcatctccccattttacaacagatccctaaggacaagtgttctctatttacttcaatctctcaagtcctgcctagaatggaacagatgctcaataaatatgtgagggctagatgaaagaaaaggaagctgttacagaaatgcaactgcagtgtcatctcaacctcaagttcccagcagccaagagatccctgttgacactacccacaagtgctgataacaaaatgcctgatagtggacggtcatcattcgactgtgcccttgaaaagaagtatctcttgacaatcttttgtaagaaaataagtcaagcagtatagcacacattcagacgcaaggaacttcagaa

SEQ ID NO: 581 - DNA, 201 bp, Homo sapiens
  Genbank Accession No. AI673818
gttttttttttttttttttttttttttttcagttaacaaacatttattcagcactcgttatgtgtcaaacactcgttatgtgtccagcactcttaagtgctggagatgtaatggaacaaaatgagacatggcctctctcatgcagctcacagtctgggcaggaatgtgaggatggctctttaagtatatgactctttatca

SEQ ID NO: 582 - DNA, 553 bp, Homo sapiens
  Genbank Accession No. AI674163
  misc_feature (1)..(553): n = a or c or g or t
aaaacattaaataattttattcttttctcatttacagtagcccagtggtaagcatgttagaaaacctgaagaaatttaaaagtttttggtttacaaaaagcatgtataaaaatacctgttcagacaaacaaagatctgatcattacattgcccagctttaagaatgccaaaaataactaaaatactgtcaatcaaatgagagggctacatgggtttattaaagtttattttaacaattttagctaagcagaatgtgctaatgtaattcaagttacagttactgccagataacataagagaaaacattgtgtgtggccacttaagattatgcctcaaacagatactgtttcgtgcgcagaacagagttggggaacacagctgggttaagtttcaatggtaagcagcaataaagatcaagaaaatccccaacttttctaataaccgctatacaatatgaaaaaaaaaatagtatctatcaccacctcttaacaatggacatcanaattaggattgtaggttttctaagtgcttggataaaaaatgcgaacacagt

SEQ ID NO: 583 - DNA, 266 bp, Homo sapiens
  Genbank Accession No. AI674603
tttttccagcactcttgcatgtagtaggacacactcagattttttcttcaagggcgcctgtaatttcttagaaaaggaccagggtgcttgtcttctttttcttccttctcggtattccaggcacaaagcactgcgcagaagctacaccaatccttgccgtcactggcagcagaatggtagaaggtgggagagaccaggaatccttccaggctgtgctgactttagaaatgaggattacacacgtttgtctcctgaaccaaaggggt

SEQ ID NO: 584 - DNA, 528 bp, Homo sapiens
  Genbank Accession No. AI675106
ttgggtgtggcaagtaacgcagtctttatttacaccacaagataacacgttgcgtgatgtggtacagaatactggactccagtgaagtggaaagaaggtgaccgtcagaagacgatatcattggtcggtgaaaatccacccacacaaaacaagacaagaatgagaaaaccaaacacaaaacctccaactccactgagcaaaagaaagaaccatcgggcacgtccagacaatccaagagaaacggattaaattacagaggtgaatggtggccacggccagtgcgcagctcacggcgggcgcgaacaggcatcaggtaggttacagtgtcgttacaacttggttttctaccacattccgtaagaagctcttgggtgagtaaggttcaagccccctgtatagatagatagatagatagatagatagatagatagatagatagattatatatgtttgtcattctcatcaattggaaaatagcgcctccactatggagcacacacggcaaaaaaaccaaacaaaaactgttcg

SEQ ID NO: 585 - DNA, 548 bp, Homo sapiens
  Genbank Accession No. AI675177
tttttccataaaaagcactttgtttaattttatcaaatcgatctgtacaaaagttagcgttgcttggtcagaaaggagtgaaggcagcaggggagtgagggtgcgtcctccgaacgcggtgccaagggagacgctgcatgaaacgggtctgcgacggctcccggcccccacccccacccccagagaaatagaagcagaggcattatcttttttttctacaaaaaagtaggaaaagtagaaaaagtacaaagaagcaacttctcggctgtgtttaagtttacaaagtttaaaggcacaagtttccgtgaagtaggcgctattgtatgctctatgctcagcacacaggggaagcagtgcaggtgaatcaggtatgactcgtctagaactgaggccctaacgacgtttagtggagaaggtttagtttcacagcttggtaggtggcactggtgcctgcgagccaagatcacttctgaagccaccactttccaggaattcctgtgtcctgtgtcctaccacatggcacagtcatgggcaaggacccaggaatt

SEQ ID NO: 586 - DNA, 462 bp, Homo sapiens
  Genbank Accession No. AI675178
ttttttaaaaatgtttttatttaattaaaaaaaagacagaacaaccaacccaaaaccagtagtaggtactggagtcacaggtgcttaactggcgaaacacacaggggtgggggcgagggggcgggtcgggaggagggagagaaggtgggcacaggccaccacatccccccgttgggtgtcaggtctgagatgcagcgggagggccaggaatgggcggcccagggcccagggtccccggagacccagctggccgcggggagaaggctgagaaggcccgggtgtctgaggtggttttgctcccggctcgtccccttcttcctactctttcttggtccctaggtgggccctgcttactctgcagccccgggtccggtctcccagcacaaccttcgtgcaaagccagcccacgccacctctggaggccagggagggctgcatttggctttagttcattgttcgtcg

SEQ ID NO: 587 - DNA, 499 bp, Homo sapiens
  Genbank Accession No. AI678986
ccgatttttaaaaaatatattatgaaacatttgttatgcagaaaagtatggataacataacaaagacctttgaactcaccattcagtataagaaataaaacatgacccatccagttgaagtcccctctatacctaccccatccccagataactacttttttaaatttgatatcattcccatgctcttcttattttactatggttttgttttgcatgttttaaaacttcatattaaattataatacatattatatgcattcatctgtcgttttctttttccccttgactttgtaatcatgagattcatctatgtggttatatatacacatacatatatcaaacatttatatatcacatacatatataatatatacatatcacagtttacatattcattactaaatattgctaaattgttttacaaaggggctataccagtttgaatacccactatcaatatataaaagaattcttgttgctttgtatctttaacaaaact

SEQ ID NO: 588 - DNA, 1072 bp, Homo sapiens
  Genbank Accession No. AI680541
  misc_feature (1)..(1072): n = a or c or g or t
tttttttttaagatgtaagaaaatatatttattttttccatgacaatactatgataaaattgttaaatacatgcatgttttaaaaacagacataagtaacatctttagagttaacagccaagcatactagttttacatttatggtgttttagtaatagattattttctatgtttttgctataatcatgttttccaaaagatacagaaactaaattctgaaattatacaatgatataaagtgtccaaatttcccattctaacagcaatttaaaatccaaattttcacaaggcaggaaatgcttcagttatcatctaagtggagtgttttattccatattactctcagaattctgtgaatcagactgaatcacacacatgtacttcatctatagttntcttcctgtattagtgtattgaaatgtttccttatacgattaaacatgantttaagtacagcacatcacaaactgttattcaccttaaaaaaaatgtctgtagtggtacatttcaagaaatgaaaaaggggacagttttggattccgagtttctccctatcttctttcagctacatttacaagcatttgaccaaacaaanatagttaaacagtactagtatttataaaaacttaaatattaacatatatactcactttaaaaacattcatctacaaacctataaagacagaaactattctgttacagatgggattgggaacgtattactatatgaatttgaagtaaaaaggtatttctaagtataggacctgactatgcagtatgaagaaagaactacatcttttagaagtaagatttgatcccccgtccggccctggtacaaataccggatcggccggcagctcttttgtcaatgtcttggtataaaagcaaaggaaaggtctggtaatgtaatcccgcccgccaaccggcgaggggcggcttggtgaaaagaaagggtggcgtacgtgtaaaactttttaaccccacccccccttcgggggggggtttnannnnnttnnnnanannnnnngngnnnnnnnnncccttccctctttatatcatacttatattatgt

SEQ ID NO: 589 - DNA, 551 bp, Homo sapiens
  Genbank Accession No. AI681307
cctgttaatggttaagcatttcaatacacaagggtgttggtgaaattcttacaaataatctgaatgtcttcactgcataacagaacctttggaaatatcttctatgtagtcaccatagaagacagtcaactctcagttactcaagaagtggtacctggtatgaaggatttggccaagaaattctctccttctaccagtctttttggtcatgccactgcttattcagaggtggacagacaacatgaaataaaattatgtatttattgtgttacagatcagccacaagtcagtggcagaaaaggtccaaaagcttctgatgacaaggatacttggggatcatctgtgaatgttatatctcaatggaaagctgactgtcagtcacataaaggaagtaacgtacactgacatcagtcagagtcaaactaatttaaggcagtactgctcctcacaaacagtgctggcataaagtgcaggtctcattgtaaaagtgactctgtagtagtaagattttctcagtttactctttctttcttgacttctctacaattaaa

SEQ ID NO: 590 - DNA, 482 bp, Homo sapiens
  Genbank Accession No. AI683036
tttttttttttatgtacactaatgtttgtatcagcagatttataatagccgaagaagcaacatagatggccgtcaatggacacatggataaacggggaatatttggccatggaaaaaaatgaaatataggttgagcattcctaatccccaaatccaaaatactacaaaatccaaactttttgagtataatgatgccacaagtgaaaaattcaacatacaaatacttaatacaaactttgtctcatgcacaaaattgttaaaaatattgtataaaattaccttcaggctatgtgtataagatgtatatgaaacaagtgaattttgtggttagactctgggtcccatctggaagacatctcattatgtaaatgcaaatattccaaaatttgaaaacatctgaaatccaaaacacttctggtctcaagcattttgggtaaggaatacttaacgtaaacggacacaagctacaatatggatggact

SEQ ID NO: 591 - DNA, 497 bp, Homo sapiens
  Genbank Accession No. AI683911
  misc_feature (1)..(497): n = a or c or g or t
gtttgagatgaggtttctccatgttgcctaggctggtctgggaaccctggcctcaagtgatccgtccacctcagcctcccaaagtgctgggataacaggcgtgagccaccgtgcccggccctccagtctaaggtattttgttacaggagcagcaatggaccaggactctgcgaaactgcacggtctcctcttttcctccccagcctctggaaaggctgcccacgggcttatctccataaatcaaagaagcctgacctgtgtgatgtgagtggtgcagacaccacagctcaaacgcaccatcgccgggcggctcactcagggtcccagcagacgccccacacttggcccaccaggaaacctcagccactctctcccttggctcttgacttgcaagcacacatgcttcttcggcaaaacgatttcagaggcgacacaatggggctcgcaaagccactgtgggggcccaggactcttaagggcacctgngaaggagtctg

SEQ ID NO: 592 - DNA, 585 bp, Homo sapiens
  Genbank Accession No. AI684457
  misc_feature (1)..(585): n = a or c or g or t
tttttcattaaaaatattattttattaacataccttaaaaatgtaataggacaatgcctcaaagaacaatttcaaaataaaaacacagaaaacaaatgaccagcaaaattgctctgaagtcttaaaaacagaaataaatacttcaataatcataggtaatatggaaatccaatgtatgacttacctatagaaaacccttctggaatttcatttaaatctaacgtcaatatgagctatgtaggaagtccattaataaataagaatattatataggtacacatgtatatattaattttaagccatatgcagccctatttgaaaatgttaaaaaaaatcatcaggattagtccatactgattattaaaaaataaaattgtcactgctcattgtagaagataaatgtcagctgtgcagcagatgtgtttatagccacccagtaatcctatcgcctcaataatgcatttccctttttttagttaaaaacttaattacattaagaaactgtatgtgtttaggaatatgaatatagaaggagtaatcatcgtttagtaaaataagttntacttgcatattaaaatttactgt

SEQ ID NO: 593 - DNA, 495 bp, Homo sapiens
  Genbank Accession No. AI686114
  misc_feature (1)..(495): n = a or c or g or t
ttttttttttcatctttgaagtcctttattcccagcagttcacatcagttactcattgagctggggttcgtcatataaccaagaattcattcatcntttcttttgatattgtaatcttgtcctcatctccacaactgagttggggcctgaggggtttaagagttctcactccatcacaggaggcaaggggtacccttgtgaaccagacttcaactcctggaagtcttgttcagttcataggcaaatatctttgcaagtttagtatgagacagcccaacggttaaataaataagacacagtgccatggttctaggcatttggagagggaaaaggcacattacacagattcccctggagaaaatacaggccattctcatcttctcaacatgcattttcccactcttcagtgactnttaatcttatcccctggtctatgagaaaccataacccacgtgctactgaatacatttttattttcccttcatgacatagact

SEQ ID NO: 594 - DNA, 510 bp, Homo sapiens
  Genbank Accession No. AI686316
  misc_feature (1)..(510): n = a or c or g or t
ccggatgttacaatcctaatttactgttttcaaaagctggatcttctctggttttattgcatcgttaccgtttaaaggaattatatttctctttcaaataaaaaaaattctaagtacgccaatacacaattgaacaaaaggcccaagaacccttctgaaccatcagggtacagaattctttaatataaatacgaacggatggggataaataatatttaaaacttagattattcaatgcttgcaaaaaaatataaataaatctgactgttcaccagcatacacacacggaaagacgtacacttagtcatccttgcacagagagcccctgtttcaaagcgcctttgattttttttctcactctttacaagaagtgcaattaaaaaaaaaaatttaaaattaaaaaaagtaatcgcttcccctcgggagccataatgtaagaacaaattcacattgaaaactcgactagaaaatttgttcatataccctgtntctgatcaaagagtggagaag

SEQ ID NO: 595 - DNA, 484 bp, Homo sapiens
  Genbank Accession No. AI689747
ctccccacagttagaataacctttattctgatccactataaagccagatgatttttaggtggcagtagctggcattgaagagttcttggcttcaagcggctgttgagtctttttggtcttgttttaactccctaattaaataaataagatccaactctttctgttgtattcactcctggacatatagaaattcacttcacacccacctaaaatacgagcagaacttctgaggcccaatgaacccatctactatttgattttgttatcccttctggagcgtgtctctaccaagagcttcacaaagcaatctagtcattgctctttcttgtactaaaaccagagtacccatcctgtaacttccatcaggacctcaaacagtgctaggcacatagtaaactcttaggcactcaaaatacatttattgatgaatgaaagaatgaacaattctagttctgacttttaaagctatatagaataaagttgc

SEQ ID NO: 596 - DNA, 368 bp, Homo sapiens
  Genbank Accession No. AI690773
ttttttttttttttttttgggagtaacagctgcttttattaacatcagaagggcaacagtacaggaagttgggtagatgtggggacaacagagagactgtggcagaggcaggactgcagatctatggaaattgcctggaagagtcagctgtaagggatgagaatcctgagggtaaaagagaaaagggaaagactcctctttgatcttatgaagctgaaataacaagatcttaaacatgagtgagaatctgttgccccaacctaaggtgactttaaatccaaggtaaaaaacacggcatgggtattagtttgaatagggaaaatgagaactctctttgagctcaaaaaaaaaaaaaaaaaaaaaaaatg

SEQ ID NO: 597 - DNA, 478 bp, Homo sapiens
  Genbank Accession No. AI691077
gcctgacagataggagccttgggaggcaggtggtggcagaatgggagcactgaaccggaagagtgggccagacccctcttggaagggactctgctggtggtgtgaatgatgccacagcacctgctcctcaggtcagtcccctggacatgcaggcgcttagcactgcacggtgagctggaaatagaggacaggggtctgagccttgaggtccaacctctggtcaggctgggagaggcgttcacagacatggaagagctcaggaagaggctgtgcagctcctcaccccccagagggaagcagcaagtgctgaggaagcatccaggagcagggctggcatcaggggaagggggaggagcacaggggctggggtgagggcccaggagggcagccagtgtgcagactgctcctcatcccaacactgctcttgccgccctcgctcctgaattcagagcgttaagagaagcgacacagcagcgcg

SEQ ID NO: 598 - DNA, 569 bp, Homo sapiens
  Genbank Accession No. AI692624
gccagaaagcaaggaagccatccaagtccaacaggatcacgtcaaaaggccatgggagtcaacttgaagagatacttattaacctgagacaatatgagcatctaaaacaattaatagtgactacaatgggctcaaatgcaaacaataatctatgagctcattacgatattcaggaaaaaaaactattggtcactacagtggaggttactagtcactaactcattattctgaaaaatgacttaaaatgggagatagggtggagaattaggtatttatccagtttttcctgtacaaacgtaaatgtttagggagattgaagtagatgaaacaagtctggcaaaattgagataactgtttaatccgggtgttgggtacatggaggttcattatatttctttcccatatattttatatttgaaccccctccaaaaaaaaaaaaaaaaacagaaaaagcaagacagaatgtgagctaagcagcttagggtttaggcaaggcttctgcctacaagagagactaggatatgaggggtaatattagtcctgatgggccaaaccaactggagggatat

SEQ ID NO: 599 - DNA, 480 bp, Homo sapiens
  Genbank Accession No. AI692687
gcggccgccaactcaatctcattctgacttggtgagttctagtgaacatcaagtagacctcaaggtggacccttctcagccttcgaatgtcagtcacaaactgtggacagccgctggttccggccatcagatacttcctttccatgaaagcagcaaggattcttgtaaaaatgatttggacacctcccacactgagtccccaaccccccatgactcaaattcacaccgccctcaactgcaggcgtttataacagaagcaaagctaaatctaccgacaaggacaatgaccagacaagatggggaaactggagatggagccaaagaaaatattgtttacctctaattgtgttgtcatttttccaaacaaaacaaaacactggcacttttgggagaaactttttgtctccattccttatgtatgtgtgattgtctgtgtccaaattgctttaagaataatatttaatatttcctggaagctca

SEQ ID NO: 600 - DNA, 522 bp, Homo sapiens
  Genbank Accession No. AI692813
attttcacatagctttttcttttaaattactcttgtacacaaacagaaggaaaaatagaaacaaaataaattacttaaggtatttcaaaacctttttcacattcagtgtctgtttcttgacttggtaattgatgtttgtgttttctcacagcatgtggtcttcatgctattaagagcagtggtgatgggcatttcgttaaagagcacaccaccattgtctctggaatctttttcttagacactgacacccattcttcaagtttgatactgatgccatcctggtcaatgaaattatcaacgcaaggttttcagagctcaaccaggactttttttcctcaactgcttcttacacggcttttgattgaagagtagctgctttgtcaccaggaatacattaccaaatgtgcagatgaataggcctaccgttatggcctacaacaggatggctccttgaagggagacatggatattatgtacccttatggtgtatcatattacttctgcaaaatattcactatccct

SEQ ID NO: 601 - DNA, 556 bp, Homo sapiens
  Genbank Accession No. AI692878
ttttaatggttatatgctttttatttgtgacatttgaatacccaagctcacatataactgatttcctaaatatcatttaattttatgttgcttttctaattgatttaattgttagttttccttatagtcaaatgcttaatacaatcataaatggaaccaaaaatatagtaaacatttctttttctgatgtatgtaaaaaagatacaggaaaattctgaaatcagatcactataagctagtaaaacaggtgaattatttgattagaaatggactcttccttcataagttacacaaatccttatgtagtcactgaaaattcttactcagaattaatacctgtccagagggaaacagcctgttataaaagctttctgttaatatattttttaaggcaggaaaacaatcattatttccaaacacactttgtttgtctaattctaggagagaatcaccaatttcttcaaggtccaaaatgatcagaacaagaatgacaacagtgtcaaccaaatgatgcctccaactccttttaatgattgtgccttggtacacatttcct

SEQ ID NO: 602 - DNA, 531 bp, Homo sapiens
  Genbank Accession No. AI693178
tttagaggtgaagttcttgtttattgttgcagcaactcttatacagacattagcgttcagttaaataaaggaagatagatagcacagtaaatacatcacaaccccaaactggatgactgtggccacgggacggaggagggagggagggagggaccagtgaccagactgtcaaggaagtacattcagtgggtgtgcggtgtccacattccaggctcacgtgtagatatattttatttatatatttatttatatttatatatagatcattgagttttgtgtatacaaagaacgatattgttacaaatacaatactatacttctcccgacactttacaataagctctatttcaccctctttacagaacaatagtacaagttcatactctaggtgctgtgctaagtatgtacaagaaatgtcattcccacacagtcctcacacactgccttgatggaggggaagaaagatcgagttgtgtgctcaagtcaacctaggccagggaaggagacacatgaaactcaaaccaacaggtg

SEQ ID NO: 603 - DNA, 830 bp, Homo sapiens
  Genbank Accession No. AI693690
  misc_feature (1)..(830): n = a or c or g or t
tttttttttttttgccgncatctctttatttgctgccagcagagtccaccaagcctgccgggcagccctgctgcccaccacgggggggtccaggcccagcccaccaccccgtggctgtctcctccaggctccagccgtcctgagggggccctggcagtgtctggagacccccaggctggaggtgaggggtgaactggactgagctcagggttagggttcccccagacccttctgggattcctacttcctgttccctgccgagaggggcaccccaaatcctccagagggctgggatggattagagttgagaatgggacaccctcaaaacccagggggtccttgcaagtccctggcgggcatccctgctgccctcacccgaccccacccccgggagctgggtgaggatggagggtgggggtccaaaaaaaagtgaggggcagtgggggcttttccccaaggccctggggggcatcctcgtgcgtccccacagttcccttgcacaggtgcaggaggctgtcaggagtcagggccgggcatcacggtcccagcgtcgcaggcgggtcggccacagcaggaggctacagagacacagggcagcggccacgcccacgccgcccgcacagncaccatcngccagtggtaaagctcacgcangccctgcgcagagctctgaagggcagggtgcangctctggatggcatgactgccagccattggcaccttatcaagagctcatgagccgacacgaacgctcgctgttctgtgggacccgatagtcgccgnatggcccacaggtgccagatgtggaacccagaacaacaaccacccct

SEQ ID NO: 604 - DNA, 540 bp, Homo sapiens
  Genbank Accession No. AI694059
ttatacaaaagcatttaacaagcttaaaaaatgaaactcaatgaaaaaaaaaagaaggtttgaacacagtcaaataacctgagaagtgacagatggaaaagcaacagaatgcaagcaccttgtaaggtctgtaatctttggatttactgtgaaaagtttcagaacatcatagactcttactgccacattgtccatagaccctggaaaataacagtgaaattcatatgtatacacatatatatgaatacacactcatgcatgcacactgtcttcacacacccctcctcaccacttaaccggagttacataaatgcttctcagatatgtcattgcatttgtttgttttctgcatctcaactaagttcagcggcttgcgcctgtgacattaattatgcaagattcaaacaaccaagcaggcacattttgggggtgagttttaagaaatctgtgacctgaaagaaattctgtggggactgtctgggttatccagtttattccgtgattatattctgtttttaggtcttgacctatttttaagct

SEQ ID NO: 605 - DNA, 514 bp, Homo sapiens
  Genbank Accession No. AI694389
tttaagtgcattttttttcttcgagatttattttttgtttgatgaatctgacaccagtcagggagaggagaatgttgtgacccagcagaaaaatatggccccagaggaggggcggcttcttcctgcctgggtgggtttggtgctggggttgatttcttattattttttaatttgttgctggaaggttttcttttgtttacttttataaatctctccccgggcttgcgagcttcccctccctcccgcctccccttcccctgcccccaaatttcatttttaaaaagcgagcttgctcgccaggtgtgtcccccaagctctcacagctctaataaataaggagcacctgtaaaacagtagcttgacttgtgaagtgactctgtacaaaggagaatctagaaatacagtatgtacaccgcatccttgggccgtggtgcttcaaggctggcgccacaccgtcctggccctgcccacccgcaactcgccacccctcctgctgaggctccgcggccttgtg

SEQ ID NO: 606 - DNA, 568 bp, Homo sapiens
  Genbank Accession No. AI695684
  misc_feature (1)..(568): n = a or c or g or t
ttttaaagcaacttttttatttacagtataaaggttacaaaggtatatatgtatttatatatataatacccttaagttacacattttcattgtaatgtacaatgctgtatgttgatgtgctactcaaggggaagtgttgtttatgcatctatatttatagagtatacataaagctttttaaaattaggaacacaaatactgccctgttttacgcgttgggtttttgatttggtatccagaagatctgagacttaaatttcaaacaagacttaaaaagaaggcttgtttaaatacagggttctaaaaagaaggaaaaaacccagaacatcacatacttttaattatttgtaaaagcattattctagttttctaagtctttatacttaaaatgaaagcagtgtgggaaagaatccacatagcaggtatatcagaatttcacagatagccaaacaggcttaatagngaggggtttttacanatcttccaaagactccagtttgtacaaaaagacagattttctggcacaaggcttataatgtcactatcatggatggaacaattgggacgt

SEQ ID NO: 607 - DNA, 494 bp, Homo sapiens
  Genbank Accession No. AI697470
ttttttttttttttttgggggcaatcacagtctttaatcattaattgtcatatttctgatttgttagcaagtgccagcttgtaggctggttgaagtacagaactcagaggaaaaaagaaattaaattttagctttctggagagcagcccctctctggcaccatcaaacacttctttgtttcccttcaacttggaactcttcaaacatcaggggttgtgagggtttggccattcttttatcttgggtccatgtgagtgacagaaatggtgcggcctgggaaagatctccctcctttacattttctcttctccctcctcctccttattctaaaactgtgcctccaacagaggggcaggggctcttgtagagagatccctggcccaggacaggagatgccaaatctaatttatctcactgagggcctttgagaaaaacgcttctgggccaggctcagtggctcatgcctatataatcccagtactttgagaagctga

SEQ ID NO: 608 - DNA, 591 bp, Homo sapiens
  Genbank Accession No. AI698134
gtctgtctcaaaaaaaaaaaagaaaaaaagaaaaaagaaaaatctcattatttcaaaatgatagacatataccaaaaacaagtctataatgtgagtagttactaaaatttacacatcttaaaagtgtgtaaatgcttaaatttcagaattaccatcagaacctcaattgacattcctttgaataggctaataagtgacaaataagattaataagatttttcaaaatcgccaggactggtgaatataaatgatgattgaactggaataatattggggaccaaatcaaatgaatgattaaattatgaagctcatatccttttgaaggtagttgcaaagagacatttcaaaactgccctaggccattgcagcatccttagatgggacgcataatcattaccttaaagcatcaccactcattttgaccatatagattttattatgttagtttaaaaggtcaatcagcctcatgactttatagttatgtcttgtatttaaaaacattttttatacatttggttatgttgataaaccaaaaacatttgattaataaaatatctatttgaataaattatgagctatcctttcaaacag

SEQ ID NO: 609 - DNA, 431 bp, Homo sapiens
  Genbank Accession No. AI698243
gataatgaccttggtttgaggtgcatgagtgaattttagaaatgaatgtacaatgtatgtctgattcacaccaggggaagtggcacagtgccctttctgggatccctacaaagtcaaattccttagatcctgagaagtggagtgcatgggatgccctgaaaaggtgggggtgtccctgtgtagcagccagtaactgatctgaagggagaggacttggctctggtgatgtaacatttcaagcctctgtgtaattacctagtcttagtcttttcttcctcattcttagtagagacgtggggaactttcatgaaaaatgctaattctgactcctctcagcgtgcaacagatttgttacacttcatccactcagctgcaagatctagagtgctttcagaggtgactggaaagagttctctaataccctacaaaga

SEQ ID NO: 610 - DNA, 509 bp, Homo sapiens
  Genbank Accession No. AI700484
acagcagttatcgtttattgagcactttctatatgctgggcactttgccatgcgcattacaactattttgaaatacttctatcccctactcctccctccttaataaccgaggggtgccgctgcgtccagggaggtcaagttcttgcccaggatcacacagccgggaacacacattccaaaacccacgggtttaaccgcgaaaacccgtttgctccttcctcagctccccatttaaataacgttttaactttattcagcaggtttgctcatctcccaccccaatcgtgactccccagaccgggtctccacagggaccaagaggcctctccctcccccttcgccgcgggagcagggaagggccttcggcagcaacttgttccacctccccaaggttcagacgcgaaactgagttccagaaggaagggcttacgcaaaggcacccagcgcgccagaagaggggtgtccttttccgtgcccggggccagtcccggggccagtccggagccgcg

SEQ ID NO: 611 - DNA, 466 bp, Homo sapiens
  Genbank Accession No. AI700646
tgaaaatgtcccccatttttacatgttagcaaccatgttttttttttttaatgttttaaatacagtatcaaacaggacagaactctgaggtatactgagctcagagaccaccagttttcaacctctgctctggtgcactgatggtgatgtgggaatttacagcctgagttaaagttcagatgtgtaaccttagacatttatatcacctctctatgcctcagtttctccttctataaaatgggcattagagcaggtacttcatggagtgtgagtgagcattaaatgagataatgaaaggggccagaccaaggcctgctttcatgccttaacttccagcctgtcattcaaagtaagccataatgtgcctctaaatctccctttctaagcttgctcctatggtgctcatcttgatgtgctctacagagtcaagtcacatcacaaagcacttttaactgtgaatgtgctg

SEQ ID NO: 612 - DNA, 484 bp, Homo sapiens
  Genbank Accession No. AI701034
ttttttttttttttttttttcaaagccactggaatcaaatcaatattttattcatacaggagtaaaaaagtaaaaaacatgaaaagaaataaaaattctgaccaaatcttaaggagggtgaatgaaaactgaatgtatgataaatgttgcatgttcagttcaatgggaaattgatcgcttatttaataagtgattgtggcacaaaggctgtcttcagcaaacaccaaataactttgtgctctgttttgagacacttttctgaatctgttagcaagaaaaatgctgaagctttctcaaatgtctgctgtgtctagggaagatgggggatggcttcaaagcaagaggccacaggtcggctgtgagcatctgtgtctagctgttgagcatctccaacagtggatgagtgtccaggtagacctgaggctgtgccctgagatttctgatcatctcccagcactgtctccaccagctgtacttcccgccc

SEQ ID NO: 613 - DNA, 455 bp, Homo sapiens
  Genbank Accession No. AI703441
agaaccctcattgtctttatcgtgtctaatactcaggtggcctgagaaataaggccccccgggatgggggcagaactaggtccgggggcagcctggatgggtatccgcgaggaggcggcctccccagcctgcccaccctcaggaacatcataagcccatactcggtccaggccctcgccaaccgcggtcacaggctgccaggtggggagtgggaagcgcccagacaccacgcgggccccagcaggcagctctgtccgcagcttgtcctccagcagcgggagcacgctaggggccaggaacacagacacgttgcggcagtccctcaggctcaccttccagagatccttgcggcgatagcagacgctgccggcacagccggccctccaggcgtgcagccgcgccagcgccaccagccaggggttcagctcgtagcccacggccgggcggaggccgca

SEQ ID NO: 614 - DNA, 433 bp, Homo sapiens
  Genbank Accession No. AI703451
gttttcactctccatttattttccttttaaagtgctacatttgtgaactctttagcagttaccctatcaaaatttcaaaatcatgaagaaggttatacataaaaaatgaatgttggcttgagggccaaggaaatattgactgattagatagaagagcacatgatagatctgaactactctatgtcatcattcatttggtcaacaactgcaagctcctggatgtggctgattttgataaagtcatagaattcacagtattcttcacatttgttcaatggtcatcataaatacacatcacaataaccctaatttgtgactgaaacagaaactcttttcttttttcttcgaattttgtataatatttattttatcaaactcttttctaaatagcatttttaatgaacatgaatgtataaaactgtgaacaatttta

SEQ ID NO: 615 - DNA, 461 bp, Homo sapiens
  Genbank Accession No. AI707589
  misc_feature (1)..(461): n = a or c or g or t
ggggaaattaagaaaccaaaatctttgctttcatgtttattaaagaagatcactaaagatattgactagagaatgctgtgtgctatttcaattacatttgtttttcttttattaacaggaattttgattcttcaaggaagtggctcaatttcaattttcaggtgaccaggtttatcgtgacttttccttcttgtttacttttcgctaggaaggggagttgtaggggcagattcaggtattggaataggaaaattacgtctaaaccatggaaatcttggaaatggaattgggggaagtgggcgaaaatggatatgggtaagggaacacaaaaaaccctgaagctaattcatcgctgncactgatacttcttttttctcgttcctggtcttgagagactgggaaaccaacagccactgccaagatggctgtgatcaggagagaactttcttcatctcaaacgt

SEQ ID NO: 616 - DNA, 550 bp, Homo sapiens
  Genbank Accession No. AI720438
gaagagcatgggtggtctttaattcaaagcagggaagctccaagagggtgactggggctgaaagttagcggtgggtggaggagggggccttggcatcttctctttatgtctctgagctgtgccttcgccaccccttctgggtcactcagttctccttcatgtccttgatatagtcctggacccacttgtcactggggttggtacagacggaatggccccttttggtgatgaagacaattccgggcttggagcactggctgttggtctcatagtaatccataatccgctgacgcgggatcttgtaggtagtgtaggtgaagcagcactctgaggggtggtaaggtccccgtgaggaggattcagtcttggtccctagggcgatggtgatgaggaggaagaagggaatggcagccacggagatcttcatgctgtgggaagctgttgtgggaggagagctggcctggtgggagcttcagaggctcaggaggtgttggaggtgggtggctggcctcttttgtctctttattattatattgagtagggcttcagc

SEQ ID NO: 617 - DNA, 538 bp, Homo sapiens
  Genbank Accession No. AI720763
ggtctttgatgatttgtataatttagattttgggaggggctctctgattactcagccaacaaatatttatagggtaccttttatatggcaaggcaccaggcacagtgctaagaggaacataagaaaaacgaacatggtctgtgccttagggagcttatatagacaaaagcaaacaaataatcattaacctttatttttgtaggtgacaaatgagcaatgcataatatgcaaaatctgggttaagggagagaatcaagatattcagaaaaaaaatctcattacctgctcctcatgcctcaaaaaaaatccagaagattttgaaatgcaggagataaacatcacatattccttattaatctttgtattccaaaaataatttctgaaaatcacaggaaagaaaacttttgtgtatttattagcagaggcaagctatactatcaattggacacctcaagggcacaaaattgcctggaactacaaccttcaagttcaaaatttctacctccagaaagcaatgatgtttctaaagattctctta

SEQ ID NO: 618 - DNA, 538 bp, Homo sapiens
  Genbank Accession No. AI732274
tttttttttttaatgaaaaaagaaatcacttttattggcttggttttctagcattgctggtgcagtgggggcctgagctggggtgcagtcggcagtgtcactgggcccgtttgggactgggttgagccatcaggccaccgtgagaaagaagcgactaaaaggcactctgggcccagcccaaccctgaaaggccagtggcaggagagctgggcgggagcaagctcttcccaggagacaagagggacaaaccagggcatctaagctgtgctgcctgcgccctgccccgcacccacgaggctggggggtttgatgcttcctgcatctggcagcccagggtccaggcaggtgagcaggtccgatgtggggaggacgagggtccgcgaggctaggctgggagggtggagaccaggccttccctgagagccgctgctagccgacagtggtctccagcgttcagggagcatgggcctcaggggccagcctcgactcaccccagctgtgtcacccacacaccgtgtgactttggacaggttcccct

SEQ ID NO: 619 - DNA, 497 bp, Homo sapiens
  Genbank Accession No. AI733679
tttttttttttacatgtggtagcgcatttaatattcacagcaacacaaatgggaagtaatattcttatcaccgttttacaaatgagaagcccaaggcccagaagagttgaatatcttgctcaagatcacacaccttttgccaccccccattccaagtcccataggcaactcagactcagcacatccatgatgtaacttatcatcttcctctccaaaccatttcctcacttgtgccctactctcagtggggacatctccaatccccaggcccaagctggaaaccggaagccatttctgactcctccctcacccactccatccaaatggagcccaagtcctgtacattgtacttcttgggtattgatcaatcccggcccttgtctccacgcccacggtgctgacccattgttaggtgcccggctgctgctcctgggtcatcacttcccagcactctctttgcaggcccatctccaccatttccagcatcctacacactg

SEQ ID NO: 620 - DNA, 762 bp, Homo sapiens
  Genbank Accession No. AI739117
  misc_feature (1)..(762): n = a or c or g or t
gagattacataggtggttataatacaaaagtgagaaaaaagctagtgtctgagtattgcatcctggatataattcctgatatatggtaaagcataaaagagacctatttcttcaggagagtagctgacccacctcagggccatgactgctcttctctttccccacagccttagtactttttgccaaaaggcccagatttgagtaaaggggaacgccgtgagcgtaggatccgggcataagggctgcagtctgttgagctttggcaggttggtgttcggggaagtaaatttcgaaggaatggtttcttccctggtggttgttggtttggttgctgattttcctggttggtaccaaggcgctttttggcagaaacctggccttggagtttcaacacagtatgatactgctcagcaatacatgctgccttcttccgaaggtccagtttcactagcaccatgttgttctgcagttcagggcaaaagagtccttgggtgcttgtagaacaagggtctccacattctcaatacggacacaaccctgatcttcctgtcgntccaactctgaaggtaacaagggcctaaccctcaagtatactttcaccttcgtcatactgtcctcagatggaacctgctgctngtcctctagggagtagagacgacagagcagtctgatagcaggttcttgcgtacgacaggaccccaaatctgcagctgtggactcaaacatggtaggaactacgacatcgtcatcggacagccagcc

SEQ ID NO: 621 - DNA, 485 bp, Homo sapiens
  Genbank Accession No. AI740483
tttttttttttttcaaagggataaagccactcactttattagactagtttttacataaataaccagacttgtttctttgcctacctaaaatacaatttacatacatcaacacgtagattactctaagacatgctcgggaaagtaattttgaatgtaaaacaagttttatgatttattttctccttagggcagaagatgtacattacatattagtgctcaaatatatgttcatttccagaatgaatttttgcacagtaatcatatatccatttaatatgtataaagtgttcttggggatgggggcattcactcactgtaccatgttttatacaggcttcaacatgcaaatttgtttatatcatggccttcaatgatcctccattctcattcccgtagataaagagttcacattgtataactgaccctgaaatgtacaaacttcgcactataacattcttcatgacactatttattaggagaaaagt

SEQ ID NO: 622 - DNA, 591 bp, Homo sapiens
  Genbank Accession No. AI740516
ttttttttttttttttttttttagtaatggaagtattctattatttttaattttatgtatgtacagacaagagctatatgggaaagtagctattacagacccattatagtttcatcatttataaccagggttggtagtaaagcaacagaaatacatcttcaatgcagacttgctcccagcatctctttcctttcatccttgaccatattgcatcctggacaggaagaagacatcctcagcccaccaccccttcccctccaatgtggactgagtgttgggtcaactgataagcagtgcagactcttcattttgctttgttggtgccttggaggcatgtgagggcacagcctcaaattccagagaccttgccttcaggatttgaggtgggcaaagatgtgaaagaagacctttagccactcagtgttatcaaaagcaatcaccaaagaagtttttgcatctggcattgtgttgggacgtccatcagcagtaccgtacggtctctttactggacaagtatttacaccttgttaacagcagtgtacacccggtggaaaactcctattcatggcatggcagaattgtaaacatttc

SEQ ID NO: 623 - DNA, 457 bp, Homo sapiens
  Genbank Accession No. AI740621
ttttttgccttgtgggagcatttcagtaatttcatatttagattctgcctaagaaccaccctaagctcctcattttatggtttaaacttacattctcttattaaaattttattcctaatggcatggtcaaatcccttacaaaggaaactccttatgaaaagatatttatgatttagggaataagttttggatcactgtcctatggattttaaagaggtgttaatgatgccatgggttggttttaggtttggagaaggcagctctcattcttggcacagctgaggacaagctggtgtggcttcatatcatattagccacgtgatgctgagtgaaccacacagcttagtgggcctttgtgtatcaacgatgaattgaggaggttggactataatgtttctagaatccttccattctttgagttggtaagtctatgccatcctatactcttcactggatg

SEQ ID NO: 624 - DNA, 592 bp, Homo sapiens
  Genbank Accession No. AI741026
ttttttttttttttctagttctttaaaaatattttaatcgggcaaaatcaccataatgtactctagcacaatgctaaaatgttatctaagatggagtggcttttattagttttacaggatgtatatttggcaatagttcttaaaaataattactcaaaaggaactctaactctattattttagaaacaatattttaaaatacagcagtaagcaacaaaaactattgctctttattcattttttggcataacactgccatacggttacagaattataaaataagtattttatagtaccatacagatccagaaactggttacaacttctaccacatacacatggtattggtactaacgaacatgcacagcattctgtaattcatactgcagttgaatacagagcacagagaaggcccagtggccactggagaatcagagcttatgttataagtaaaacacacatctttgtaacaatcgtaggcattttcctgaaatatttaaaatacaagggacacaatagtttccaaaatgacataatctaccatccttcttagataatactaaaaaagaaagattaccttacataggaaaca

SEQ ID NO: 625 - DNA, 641 bp, Homo sapiens
  Genbank Accession No. AI741776
  misc_feature (1)..(641): n = a or c or g or t
tttttttttttgtaatcctttaaaaatattttattaagcattgatttagaaaacgcaagacaagattgtaacacctcagggcaaaggcttgaaggtgaaacaaataacactataaatattgcacttctaaaatctttttttgacatcttcacacaactcaattctaaaatatccttttacagagatgtataaataaacgcttccaagctgtcaacgcttgacacttttagcttcctatcaccgcactaagtcggcaggtttccaatcagatagctgctcctctgacagcaggcaaagaacttccctcagctatctcggaggcctcatacctccatcatgtgaagagtcaaccagtcccatctttcggaatgctctttcagaatatgtaattttataagtatttttttttctactgagagaacatagatctttcaaaggcaatggcagaatacagcttaaatggacacagttcactgttaacattgcttattttttaaggcatccaggagcttctgattcttggtcttgaacatcatgataaagctgtttggcatgattttgcctcgcccatcttcacctacttggcccataataatgtaatttagacctcttctgangagaaggcactgcttgcagacgac

SEQ ID NO: 626 - DNA, 454 bp, Homo sapiens
  Genbank Accession No. AI741880
tttttttgatttataaacatttttaatgactgtgttaaaaaaccatcatacaaaaagaaaagaaagttgttttcaacttaaaaaaaatccttatataatgtaccactcatctgggatatgcttctgggagggggacactccctgcttgggctgcagcagaaggcagtggggagaaagtcttaaagttctgggagtcaggctagcccctcctgcaggtgtcctcattgccacttcttggtccctggggtcaagggttaaaggtgccaaaagaccactgatcgaacctgagactgttgagatgtcctgttcccaacagagagtatctgaactccagaaacttccctctcaggcctccactcccccctcctttgtactgtgcatcctactctgacttccgtggctggggcagatcaaatgtacattctcagtgtcccctggtaacaacctctccctt

SEQ ID NO: 627 - DNA, 490 bp, Homo sapiens
  Genbank Accession No. AI742002
ttttttaagcgcttaataatagcttttattatcatgttcggctcaaaggcagggaggagtggaacggcatgggagggctgcgggaggcacggcaggggggtcaggggcaagtggcaggagggcggatggggggcagcggtgggcaccggggcagggcgcgctgacctgtcctggggcccgggttgggggcagaaatgagcctgcccacgctgtcccgccacggcaggcgccacgcatcctcgacacagccgccatggcaggccttcgggctccgtctccgggacaggcggtgcagggcaaattggtatgcagcgtccgccccgtgggcccgggagagcctgccccgcagggaccagagcccaaggacgggctcaacactcagtcaaggtggggttgacgacggccagacaacaggggagggaggagggacaagggggtccccacttccagggacgcacaatagcagagccacttacacgctggggagggg

SEQ ID NO: 628 - DNA, 603 bp, Homo sapiens
  Genbank Accession No. AI742057
agattagtaaaccacagcaaagtttattcatgtgccagggacataaagatacattaattgtttgtttttctaggctgccagtataagcttttcaaaatgtttaaagtaaataaaaccaataatacagctagataccacattgcaaagaaccctaatgctatttatcagctttaaaatactttcaactgaaatcaattacattttaatatacacatattatacagaaattacctatagctcttttaaaaattctatgacattaacatgaaactttattagaatttaagattctatatgcagacctgataaagccttaaatttaattattttggagtaatgtcttcttaagaaatggtagataggataaaataatttacagatttatctgcctttgaactggaaggaattttaggtaatcacctggttcaacctactccctaaagtcacacagctctataatttccccctcactcagctacttttttctgtctaaagatatgtcaaagcgatttcatatgtaatcatgagacattcaagtgcaagataatttaccaagaaatcccactccaagatccactgtacttatttaacaagacaaattaa

SEQ ID NO: 629 - DNA, 493 bp, Homo sapiens
  Genbank Accession No. AI742239
ttttttttacagtgcaagggttttaatagtccacactaaaataggctgtacagttttgtagtttaacattaaaagcaatcctgccttattttaaaatgcttctacttaagaatgcttcttcctcccccactccttcacttaaggtataagtctacccctaaagtgcatttctcaggcattaaaaacagcactgtgatttgctttccacagagtcctaaataacagccaccttcttcatttgagaggctacagagttcaagctgagctgtgacaggagccagggggccagggccccagaatagctttttgaaaaaaaataattatgccaccctcctccgcggcaggtatcttctcttaccacaaataaatatttaatgcatccttggagtcatgaaatattgagaacccaattgacacttcaatttccagaaaaataaaatcatgaaggcattgtgtaaatattctgaatttggtggaatgagacaacgcgtaa

SEQ ID NO: 630 - DNA, 789 bp, Homo sapiens
  Genbank Accession No. AI742260
  misc_feature (1)..(789): n = a or c or g or t
agcttcaattattttttaattttgttcaatcttgcatttgttcaaccaaaaacaatttaaagaggaacacgacaatcagccttagattgagcaagttcagctcctcactagggagttcttgaatccaccatgaaaatcaacagtgtgcatctaacagttttcttttaatttgagaactgaaaagtgaatcatcacatcaaatattcttcagggtctctttggtttccagattaaacatgtaatgtgacggtcatcttgccacattctcacatttccattttaaataatcataaataagaaaaccttactattctttggcataacacagctgattgattccgctgagtttcaaagtcttagaaattgcactcattccttctttagagtcctgcttcatggcaaaagttttcagctgaaagactctttattgtattcaaatcttgtcccatatgagttgttctggttactcagtttatgaagagtcttggatagtgaattgggtccacaacagaaaacaccaactgtttttcctctgttatattttgctatttcatcaaacaaaagtttccaccggagacgtnctatanacagtcttgaattcagtgcatgatatttttctncaattatcttctgtatcccatctgtttgactgacgtacagcctgatgttgacatagtcaggtctggtctcttgccaaaacttgtatgcaacatacagagtaaatctggcaaccaacggaaggactggatatctctgcctaccccaaataaagtatgtctttcttagctt

SEQ ID NO: 631 - DNA, 550 bp, Homo sapiens
  Genbank Accession No. AI742490
tttttgttttaaagcaatatttatttttcatgaagataagaggcatattacattcgctatagaaaatgctatgagaggaaaaagctgcatgttatcgatatgacaaaaaacataaaaaactctacttatgaaagtgttttgccctataagaacatattcaataaaaggcattattccaggtgaatgagccatgcggaaatgtggatttattagggtttgttttgaaatgtaatttgtacggccagctttttattcctttgatggctatcaaatagatttattggctacatgttagaagtgcaaaagataacaggtaaccaagggagaagttttaataaaactctcaggaaaggcaaagaaaagtgagtgaatatgcctgcttacatttcagctaataaataaaaagtgcagatagggctttaactgaaaaccttgctggttattgcagcctggaaggtttattgaaaactgggtagaacactctcattttttatatttacagctacattgtgagctgttcaggttagagtgatgtaacgttcattttgac

SEQ ID NO: 632 - DNA, 549 bp, Homo sapiens
  Genbank Accession No. AI742521
ttttgttttatgttctttacttgccaatgcagaaaaacagacaaatacatcttaatggtatttccaacaattaacaaaagaaaggagttcgtgcttaactcagagttaactagaaaaatcccttttattaaaatacattgtaaatattgctcattaatttcctgtacttgaaacattttttctgaacccctaagcaccacttaggatagatgaagcaaacctgatgtgttttatttcttctctattacctgagtatgaatgtgacatttaactccttgaacttcttgctcctctgaagacatgaggtgctatcactggatttctctaagtaagaatagcagaagtcgttttaaaaaaatactgcagatagtttttctttccaaattttatgaaaataggtataggaaagaaaatctgaatgtccttggtgtcagtatccatctgctccatgcatccaggcagggcttctttccattcccaaagagggggacagtctgcctaacagggccattgctaccaactgtggagccagctcttagactgaggtaa

SEQ ID NO: 633 - DNA, 663 bp, Homo sapiens
  Genbank Accession No. AI743516
  misc_feature (1)..(663): n = a or c or g or t
caattcaggtagtttgagctgtttcctggtttagagtcttatcagtcaaacctaacacactttctcgttttatgactgctgtattagggttctccagagaaaaagaaccaataggatacacctccctcttgaaagattcatcagaagctatttgctctgtgattatggaggctgaggagtcccatcatctgccctctgcaagctggagacccaggaaagctggtgttgcagatcaaagggctgagagcagagagctgatggtgtagataccagtccaagtctgaaggtctgagaaccaggagtgctgagggcacaagattcatagcccagctcaagattgaattcaaagagtgaattcaatcttcctctgccactttgttctatttaggccctgaatggattggatgatgctcacccaactggacccatatctactttactccgttcaccaattcaaaatgctaacctctttcagaaacacccacacagacactccaataaaatatttaactagatatgtaggaatcctgtatcttagtcaagttgacatgaaattaaccatcacaactacataataaaaaccagtgataatcagcatatcagtaattatgcanaatagttagattcaccttaccatagacaacaacctattgatggctactg

SEQ ID NO: 634 - DNA, 570 bp, Homo sapiens
  Genbank Accession No. AI743599
tttaaggctaagatccacaatggcaggtatattcctataggcttctgtgagaagatttttaaaagttttatttacatttttatcaaatattctaatttatttcagcaagagtttttttttttttacttgtcagaattacatctctatctttttcctaattacactttctgtctcttgggttttagattccatgctacctttcatcttcttgagttcttccttataagttttcctctctgaccaaagtcagtttcagaagtatgatgacatgcacattcagtttaattcttattcttaaggtgtcatacttgcttcatttaactttgatttcactatgtgttgtttgtttattcatctttgaattgtaagcatgacaagactcaagctgtaacattctctcctgtgtcatatatgaggatagagcaatgctatttccccctatgtgaatttggagctccgaatatttaactttctatagtgatgggctattcttctgatgtcgagcccttttttctcactggaggctttcttgactaataccttgaatttcacatacgtcttttgcgcctg

SEQ ID NO: 635 - DNA, 452 bp, Homo sapiens
  Genbank Accession No. AI743671
  misc_feature (1)..(452): n = a or c or g or t
ttttttttttttttttcatttcttataaattaattacataataatattataataattattatcaataataataatataaaaaacataaatctttgtggggcgtatcacaacgtcagggtcaggaggcctcaggactggagcagggggtgaaaccccccggatggaactccatacaaaaggaggtgaagcggaactgaccctgtaaagttaaaaacccaaattgaacggaaccaaaacccacaggtgagtgtgagaccgagtgtgtatgtggcagtctgttacagtgactgctgctgtgtgacctgaactgttggcggaaggatgagtgggtgtgactctgtgcccagggagtggggccggtgggccagggcggggcgggcaggcacaaaccggcgtgccaggcccctgggttgngaaaacttctgttttctttttttttttattttattaaa

SEQ ID NO: 636 - DNA, 489 bp, Homo sapiens
  Genbank Accession No. AI743715
ttcattttttggttgatttttttgccttcccttcaattttaaactgaagcattttaatgtgggtagaaactctacaccaaatacactaaacattttggtgcttagtggatttctttttaggtaactggtactttacacatattagctcattcagtccccagacagacgggatgaagtaggtattgttactgttcccattttacaggtgagagatttgaagcctggggaggctagtaaactcaccccaaggtcacacggctcatacatggtgggactgagactcagatgcaggcagtctggcacctcagtctggattctaaccatttcactaagctatttttgtcttgtactactttgacccacccctgaataaacctcaattgctggagtggggtgtagttattaaagggatgctttttaccttttgctgtctgctgtggcagattccccagataaccaaggaaaaggggccacccatacctggaaata

SEQ ID NO: 637 - DNA, 505 bp, Homo sapiens
  Genbank Accession No. AI743925
ttttaagtttgtctggtttatttgcaggctgtagagatgatatcccagtccacgcacactcccatgcacacgcacacacatacttcatccacctgaatttgcccgacaaaccctcctctgagtcatagggacaaagccatacttggcagtcctcacgttactggttacattagatttggtctttcagaaagaagatggttgaaaccagtgggttaacccaacctggccatttcctcatgccttacctgttttcctccctcaatctgctatcagaggtgactaaggagccgcagggaacccacgttggctccaaccaccaagacctcccagtcctgtccacttaaggtgttgcaaaggctctgccaagactctcacccagtcttgggcccatctaggcccccaggactgcagggaagtcaccccatacctcccccttcctaacatttatctcattgtcattgtctgggtctcactttcctattggactctaagttccatgaatctg

SEQ ID NO: 638 - DNA, 828 bp, Homo sapiens
  Genbank Accession No. AI744109
tttaatatgccacaatttttattgcaacgtggccatttttgtgagggtggggagtttgatctcaaaacaatgttccatttaaggctcttttatacagaaattgccatcatgactgatattcaaaatatctttagtgttgcaggactcacatggtaaacataaaactcctacacttattcagtagtgtacactcaatggaaaacaaaaaggcattaataacagctatttcttttaagaagatatgcaggtaacaggaatgaacactgaggtactaggataagttgatgacacagttaacaaaacttaattggcattccttttaggatattaaacttattacaaaaagtgcttttaatgcatagtgttatatccgtgctgccatatcactaaaataggcttgccaaggcaggtgaggtgtatgaatgctcaagcctcacagaactgcaatcaagtgccaactataaataatactgaaaaaagttgaccatctgaccagtggataatactttcaaggcattcaattagcttatcctttgcagtattctaagctattcacattgacgatcacacacattgtagtgcttgctttttaaggtgcactttcaggagcccagaatataaatactaggtcttctttcttagactctttttgttcgtatgtggcatcgtacaaagcatatcggcaatcattcagaggtagcaacctcaccaaagatgtgtaggggtcctcttacatattaccaatgtcaccaaccagatctgctttgcttctctacaattattggcttttgcatcgcttaaacagaagagaacgctttcttctctttt

SEQ ID NO: 639 - DNA, 574 bp, Homo sapiens
  Genbank Accession No. AI745624
tttttttttttgcaaagttaacatttttattgaactgaaattggtgtagaacaggggcaaccacagctgctgagctctgtaacaactgaaaagcccctgtgacattttacctttgagagtcctaacacggtttgagtggaacagctgagaaacagcatatatatattttaacacctcaaaatagtttgaaatgagcctcacagccttgttcaatcttcagattacaaataacattgatagcatctcctgtggccttcagttagtagtgccagttaatattgtttctgaaaactttcctctcaaagtgctggctataattttttctccatccagtacacataagaaaaggatttagtaacacttgggcaagtaataaactgtagaactttaaaagtagtaaaggcatataccaagcatacgtgactccacacattgtcagaaaggcagtggactggctaacgagtttctgccaagtttcagaagcaaagaatgcactaatgaaaagggtaaggcatccaagcagagtgtctgaattgatggaccatttttgtctaaaactaatttcaacatcttc

SEQ ID NO: 640 - DNA, 617 bp, Homo sapiens
  Genbank Accession No. AI750575
gcacgagagcttttctacatgatataagcaggtattgcatattttcatatatctgggggaaaataaaggaagactccaaataaattgtaaaatacagaaacaaaaacaaaaaaaagtgcaagtgatttttctaccagacagcgaagcacccctttgcttcccatgcgacttcaagaaggtttcctatactatacatatatatacgttctggttggcaagccctgctgatcagagaaagtctctgcatgttctagtgttagtaactaatttttatatagttaatgtaggataaagtagagtgcattaagacacaatattgtaatccctactctaggcacttgcctttaaactatgtttttcagcccttcagaagggttctactactgtcctatacaatcaagtaactgaaattcttgggaagacactttgctcctcatctttctccccgaaacaatgttgttttgttttgttttttttccttaatttgcacgaaaacaaaaattccatatcaatgtgccttgccctggatagcgattatttgtggaattgttgcacatgctcctctattgaaaggggtttttccctagtcaagcatttggagacactttttgtaaatg

SEQ ID NO: 641 - DNA, 513 bp, Homo sapiens
  Genbank Accession No. AI751438
gcacgagtttgagatggagtcttactctgtcacccaggctggagtgcagtagcacgatcttggcttactgcaacctctacctcctaggttcaagcaattgtcctgtctcagcctcccgagtactgggactactgtcttgcgccaccatgcctggctaatttttgtatatttagtaaagatgggttttcgccatgttggccaggctggtctcaaactcctggcctcaagtgatgcacctgcctcagccttccaaagtgctgggattacaggcatgagccaccgtgcccggccaaagtcagctttcaaaatccaagccataattggtgaggggggagtttcagaattacatagaaaaattaatatttgaaaaaataattctgaaatttcgaatttaaaaacagatgtgctgcttctgggtgtaggtagtaaaagtataggaaaagaactgtttccttagaagcggactgtggaagggctatgtagaatgtcaaagggcaacaagagcctgtgttt

SEQ ID NO: 642 - DNA, 576 bp, Homo sapiens
  Genbank Accession No. AI752682
ggcacgagcaggacttcagagaaaaaaaggttctgtatgtgaaattattcatatggcactgtgttcatgttttgtatattcaagtacaaaagaaactatgtatagtggttatgcgtgggtacagaagatgaataataatgaaaaactgtgattttttgactatcacatacattgtgttaaaaaacaggtaaatataatgactattactgttaagaaagacaaggaggaaaactgtttcaatgttcaggtttaaatactaagcacaaaaatataacaaattctgtgtctacaataatttttgaagtgtatacaagtgcattgcaaatgagctctttaaaatttaaagtccatttcccctttagccaagcatatgtctacatttatgatttctttctcttattttaaagtctcttctggtttagttttttaaaaagtttcatcatggctgtcatcttggaatctagcctccagctcaaagctgagacttcacgcataccatattctcctttctggttgcatcttcaccctaagtttctccaagtattcagagttaaatagcaccaacttcttttatat

SEQ ID NO: 643 - DNA, 535 bp, Homo sapiens
  Genbank Accession No. AI758223
  misc_feature (1)..(535): n = a or c or g or t
acttttantaaattttatttacaaaaacagatagtgagctatatttggcccacaggcagtggtaattcactgacccttgctataaaggcttgataaattttattagtattattaatacaatgacttacaaataatctttaatacttaacaaagcaatatattttttaaccaagaactaagtatatacctcatttacaattattttaaaacaaatttgcttatgggagcaatgaaaaaaaaaatcttgcctgtaaattctggtgtaacttaattgaattttaaagaaaaagttttaactacagagactgactgacattccattgttctacgtccctgagggagaagtaccttaattgaattttaaagaaaaagttttaactacagagactgactgacattccattgttctacgtccctgagggagaagtacaggccaaaatgaagagcaatgttcacaaaggcttggtagaaataagaggagaaatttgctggaatcttcaacatctctgacctttgttctctcttggaagggctt

SEQ ID NO: 644 - DNA, 633 bp, Homo sapiens
  Genbank Accession No. AI758408
  misc_feature (1)..(633): n = a or c or g or t
aaattttaagaagatttttatttaaacacttttattacaatatttaggtggcacaataactaacaagcttctgagacaggaggtaacattctcatagactttgcaactcagccagaagtaaaactcgaaataaatatgtcatttaaagtaactatgaaggtaataataaaaggagtgttgttagtactaagaaggttttcaatgcagggtccaatagctatatttacatatacagaaaaaatgaaattagttactaaacataacaaaaaaaacttggtatacctatagcaatgcatatttaccaaaaactggtgaaaaatatattgagagatatgttaaatatttgctgaaaagaaaactacttgtctgtatgtgaaaccccatgaatcattttacacatcaggaccaaaaaactaactccttttattcctcaaaatcaaaaggtggtctcatctaacccaaaaatctcgacttggcaggtatttggctttctaatttggacaataattacttatttttttctttaaccaggaggttccttagcaaaattattatattttggcccatctaacaaaatgggcattggactctttaggggngtgttatggagtaatttttgggggaagttcccag

SEQ ID NO: 645 - DNA, 542 bp, Homo sapiens
  Genbank Accession No. AI760319
tttttttttttattttctgcattggtaattgagagagagagagagagaactttatacattaggaactggtgcacttaaattatgggacagatgaccttaaaaactagaggtattgtcaacaatacaacttcaattttatattattacagttactgatatttttaaaataatgtaaacaaaaatatagataagttatgccaaaacaaaaggtaaaatccaaaaaacagaaagaacacatatataagttagcacatttgctactacaaataacttaacacaaagtgatatagcagcccagacccaaaattttagtcatttctggactgtgtgagcagatataagaaaaaatggcatagacctgacccaggagctacagaacaagttttgcagaagttttttacatcaccacgttcaatactctgcatttgcaacctaagcattttctctcctttaaaaaaaaaagtatatatatatatttttcaaagagatgagggtctcgctatcttgcccagacttgtcttgaactcctgggctccagtgat

SEQ ID NO: 646 - DNA, 548 bp, Homo sapiens
  Genbank Accession No. AI760370
cacaaatactgttgtaaatatattaaaaaaatcagcattctatctggtaaacgtcacttttgcccctctataaaattttgaattaaaaaagcctcaagaactttttattgttccccccaccctccatttctttttctttttctcttccacaagaatatatcctgacacttttttttttttttgcaaagattgttggaaataatccttctcttgtacctagaaacataggtgcaaatttctgatatctttgttttatctgcattcctgcctttcatgaaagtccctcttgattgtgctgaggctgtggctcagcgaagacactgaataaatacgatagccactgttgcttgttgcttgtccaagtcttcctggcttctgctgcaagagggggatatggagaaggtgggccagggtgtgtggacccgggcagaatctggggaagaagcctgccattcgtctttctttcccacaccaccgaacccactgcccttcccacccccacagcccttttatgaaatcagacaacgtggtaggtggaaaacagcagg

SEQ ID NO: 647 - DNA, 487 bp, Homo sapiens
  Genbank Accession No. AI760534
ttttttttttttttttttttttttactggtttcaggcactgcaaattttcttcccctccatttgcagaatttaacaccatttaacacgaacccaaggcaggttgagagcggagatgtaaacattttcaacagtagcgtggactttacggctttctacatccccatgtgggttgaggctgcaactggttttggggaggggggggcagagcagggagaaggcgttaactgccagatgggacagggcagcagccaagccccacagcccagctgcaaagggctgttcacggggcacacgtgggaggtacccagtttggctctttcccatccctgatctgaaaaaggaactccactgactgataaaattcttcatcgctattagggcaaaatctactccccaaggcactgtgtgcatggtcccaagatggaaattctccacgtgttacttcctaggcagtagcaccactcaaaagaatccaggcctgcgcct

SEQ ID NO: 648 - DNA, 561 bp, Homo sapiens
  Genbank Accession No. AI760589
  misc_feature (1)..(561): n = a or c or g or t
tttttagattttttatgaaaatttaataatagtatttcagttaattatggcatttgagaaaaagatactaatggggaaagatcacatacatgctttgggtgatacgttaaaaaaacctacaataattagtagtattgccttaacatttctaaaatcacataaaaatgatcatctttgattgccatttcagtaattttgaatacagggtatgttattttctgctcactagtaatcaaaacacataaaacagacttgtaacaaatattcagagtcgattattttcataagctaaacagttccgatactttaagatttgtgtttgagcatacagtactgcaatgttggctacataaaataaaaaaatctttttaagaggaagctcaataatcagaggctgtattgcatttaaggatttaacactggctatatacaaaagggaaagcatttcaatgagaaatacttcacgttaccaagttctctcctttaatatggcaacattcagcagcttatgctactctnttatcctttggttcccagtgacaaacaatgcagtaataatgc

SEQ ID NO: 649 - DNA, 538 bp, Homo sapiens
  Genbank Accession No. AI761241
  misc_feature (1)..(538): n = a or c or g or t
tttgcatagntgcatacaaaagggagcaattgacgttttgtttaaaatataacctttcgatactatatttatttcacatatgtataaatataacccaaagaatatgtttgaagtatttctaccaaaatattctttacaaaagtttacaaaacaagtcatttatttatatttacaaactagcacagggaagattctgggccagtgatgttggtattgtaaagaaggagagtgccttcagacattttaaagactgggagacagctttgcacaattttcaaagtgtgttctttttctttgaacagatattgaaagacttgattattaaataacttcagctaaattacatttgatatttgaatatgtgagcatagaactgaaagggctgaagataacctttgctcctctgtaattaggaaaatgatagtgatattttgcattcattccaaatcagcacacgtcttccccattttacagctgatctggatgtggacactaaggttaaatgactcaacaaaaactctttaatacagtgctcagc

SEQ ID NO: 650 - DNA, 441 bp, Homo sapiens
  Genbank Accession No. AI761274
tttaaaatagttaaataaatctttaatatttctaattgcagatgtacagaaattgcacagccacacagagtcttagaacaccaacagcttcctctgtacattattacatagttaaaagtcgcagctggagggaggagctccagcccaaactccaacgtttgcattttttccttttcacatacttacaaaagaggggagctgggacgcggtgcgggagctggggggctttgtggctgagtgtgtagaaaagagagaggctgtttccctggacagtctggctgcaggcagggcccagctcccgggaactcaggttctctgtggcctgggcaggagccccccgttgactggcccagtgaaggcaccccagtggccactactcagacagcagctgcaaagccaacacacaaatgccacaggcagggaagacaccccccgcagaca

SEQ ID NO: 651 - DNA, 576 bp, Homo sapiens
  Genbank Accession No. AI761782
gttctgattttgactagggtaacttcttctttattaaagcaaataactggacataatcttaaaggattccacctccatcgtctttcctaacttagatcttcattgagaaattgggcaaggttaagtttacttttttctagtgctgcggttttggctcgtcttggtagtctcatcttcatttctgattctggttctggaacttcatgatcactttcagagtcggcttcagcagtctgacacctcctgttcgtcctagctgaaactgtcacttttttctgtcctctgttagtctttagctgagtagactttgatgcttgggttgcttttacacccctgagtggagtcatatatacttctttattcttttcatcttcattttggaaagtagttgtagtcaaggtggcatcctgtgctgcttcagcttggtcaccaaattctttatttcctttttctaactgaatcttgattttctccaaagctctcagacatgtcctatcttttacttgctccagaatctcattcaatagaaccagaagatcttttgcaagatggctactgagttctaaagaactcaag

SEQ ID NO: 652 - DNA, 547 bp, Homo sapiens
  Genbank Accession No. AI761844
tttttttagatttaaaatagtatattgcaaaatagttcaacatattatttctaagcacaaggcaagctccattctgaaggatgctttttaatcttataaagcaaactgttccaatatttctgtggtaaagtctaaatatttacaataaaagatgaatctttacacagacaggacataaacttcaatacctaaccacaatgcaaacattttacattatgacatcactctaatgtgaagcttagtttgttaacatgtgctcaagaaggaaaataaaaacaatacagttctgtagctttgtaacaggcagaactctgcaacaattagagaaataaaaacagcaaacaacaccagttctatgagtaacaaaacaaaaaaaatccagatattataaacatttaagtaaataactaatacatccttcctgatatatctttatttgctctcttctgttaaatacgttttttaaaatgtttctcatatcccaggaggaaaggacagtaaattattcacaaagataaaagtgcatcatgtttgaaaagtgctttgt

SEQ ID NO: 653 - DNA, 558 bp, Homo sapiens
  Genbank Accession No. AI763136
tttttgcttgataattgtttattggataaacgagcgaaggataatcacctgagcaccatagttgccaaagccccctctagtcccaaacctaagcccacactctgtccccttgcaagtaaagaaatgcaccaagcagggcttatgcagcagccctcggtctggcctggctggagctataaacatgcatgctccgaaaagccgcctcgcggaaggtattcctttaactgcaggtgtttgttgcccttggcacagcaatatgtaatttcccatttttagaacaatgctccaaagaacggtcacaaaaacaaccttaagagggggtggttttcttcctggccgcttctacagtcctgcatttggggtggagactgaaactgccccggcttggctgctggcttccttctgtttgttctggtctttgcattccagtgctgatggctgtggtgtgttcagaaccacttcagagctgcaggagctgaagacttcacgggtccaggtctggccaggctcgggagagcggtcccccttgcggtgcagcttcaggcccaccgtgtggtg

SEQ ID NO: 654 - DNA, 569 bp, Homo sapiens
  Genbank Accession No. AI763298
  misc_feature (1)..(569): n = a or c or g or t
ccagcttccataattctttattaaatatttgacaagttgcatcgcttctttacaatgacttcattttgtcacattagtcttttgctgtcaggaaaacaatctacagtttctctttagatctctcaagaaaaaagaaaagcgaaaggattgttcttcaagaaaacttcctgtgtgtatcaaattcaaccatattttaaagctattctgactgtgaaaatgaggattattcataagttgccttaaaaaaattcaaggtagtttggtttttaccactgtatcaaatagtacttggcttcctattaggaggtgggtttataataaaaagttatgaaacattgataatttatttggaatgcttgaaactcttttcaccttaaaagtcactgtttttttcatgtttcatttgatgatagatcctgaattaggaaatgacagcaaattaacatcatcntccctaggttttcttaggctcccagggttgaaattcacaggacacagcttgnagaaaactgcagaagggactaaactctcacctcctttcgaaaacagattactcaataaaaagtgaa

SEQ ID NO: 655 - DNA, 704 bp, Homo sapiens
  Genbank Accession No. AI766029
tcacatacacataattttattatagtatattgttataactgttctgttttattattaattatggtgcctaatttaaaaattaaactttattgtaggtatttatgtttagaaaaaaaacatagtatgtataagattcggtactatctgtggtttcagtcacccaccgggggtcttagaatgtacccctgtggataagggggaactactgtatatactcctctcttgcaacgcactaagacagagcgggtttaaaatgtgaccacttgggccagcttgctgtggacaatttcactacatttaaaactaccttaggtttctgagatacacctacttaactgtagctatggtaaagaaggatttaatattcagtaatggtacatacttgttatctcctacctagggaaatccatagatatccctttttaccttgaattattatgaaatatgttattattcatatcagaacaaagaaataatgcaaatttcccatttccttcactcagttatgactaagaatacatcataagcacagtgaatacatcattacatcaccttctaaatctaaaaaaagtttatttaaccaacgtaaccatattgaataaaatcagcttgggagaaaaattagtgcttgctaaatcatggagaacaacaatatctttttaaacaatatatcccacagatgttgtaaattgaatgcgaacttc

SEQ ID NO: 656 - DNA, 518 bp, Homo sapiens
  Genbank Accession No. AI766666
  misc_feature (1)..(518): n = a or c or g or t
tctgatgttctgctcagcatgttctgggtgcttctcatctgcatcattcctttcagatgctgtagcttcttcctcctctttctgcctccttttctttttcttttttttggggggcttgctctctgactgcagttgaggggccccagggtcctggcctttgagacgagccaggaaggcctgctcctgggcctctaggcgagcaagcttggccttcattgtgatcccaagacgggcagccctgaaacagacagggtccaagtaaaagcgagggtatcgggggaaatgggcctagtccttaagcctgcagggaaagttggtggagggtaggagtggggagctgcctatcttcaggcaatagatgggtaggtaataggaatcatttccctggggtaaaaagaaccaagaggtggcacaggccatggtcnaaggtgggggagaaaagggagctcaaggagctgaccactacttacttgtgtgctgttcgcccctcacaggcttggagcagcatctcatcagtc

SEQ ID NO: 657 - DNA, 505 bp, Homo sapiens
  Genbank Accession No. AI768325
ttttttggggaaatttgttctgtttgttttaattaaaccgactgaagaagccaagacacagatggaaagagactaagaacaagactggaaatagtttagaaaagaaatgaaaaccggtcgcggagatgtcagtgcctgatggagtggccggggcgggtgccttcacgtcagctccagaatcactgtcagggcgagcaccaaggtgagccgggcaccagtggggccaatggaaccattagagtcctccgttcctctttgggatatttgggttttcaaacacgatgagccgggtgtgcgtgtcggtggagcccagtgggttctgggcggtgcagcgatacatggagccattgagctcggcgggaacccgctccagcaccagctccttcccgtcgaactcagcgctgccgtccaggaggcggctcccaacccgcgtccacgtgaacatgggctccgggaagacttcgttctgaaacccatggaccagaatcctcactgtgtcccctac

SEQ ID NO: 658 - DNA, 554 bp, Homo sapiens
  Genbank Accession No. AI768516
caggctgatatccatttaatagtttttgaagattttttcctgtaaaatggcttgtatttccacaggtacaatagtgaagaaataaacttttcaatttgacatgaaatataaaacaacaattttacaaacatattcataaaatttaactgctaataacacaatacatggtaaatgtgaccatccccttaacttctagactatttaatacagagaagcaatctgtcatctcagctaaaaagaaacatctttcctttcattgaggttaatttttgtttgtttagaaactgtcaagcaaaactggaaaatacttattttccttatcttcctctagggattcttcatgagggcaaagacttatttgaaaggatgtaagttatactaaaaagaaaatactgaaccttttttttgtgttactgcttcaatgatgcttagattattttaaaaagatgctgaagtcgtctcattggtcgcacagaaggaggcgcatcataacctaagccacaaaggctaaactactgggacagaagattgacagtaaagggatggagatggat

SEQ ID NO: 659 - DNA, 556 bp, Homo sapiens
  Genbank Accession No. AI768777
ttttgggattcattttcgcttttaataaaaaagaaatttcctcctacaattgatcctgcacacgggggggccatgagccacgcctgctgactcattcctccaattctcaaacacaagcaacgattcaggtcctggtgagaaccattcacgactcctccgggacctgttccaccctccccgtcatgcacagatgatcttagtaaccagagtaagagtctgcctgagacacgagtcttttttcctggctccaagggctagtgccaaagttcctccctccaccggggagggaggtgagacttgagtccctgagtgggtgtctgggtgttcacgtgtcctgctgagcagcgcggggcggctgcctccaggtcaccacacctggcacacccggatcacctccctcagcgccttcagcccctccatgcttttgtccttcacggccacggcgaggaggactgctctgtttccagcttcttgagacacaaacgctaccaggttctttgcaaagacatggatgagaggctggtaaaggaaggagaagaaaccattttaactgcaa

SEQ ID NO: 660 - DNA, 585 bp, Homo sapiens
  Genbank Accession No. AI769199
tccattgcatacagtttatttcactagattgcaattttatacacagtatgaaggggtttcctgatagcacatatatagtttactttctgtactgctgaagaaccaattgttttttacattgtatcataataccctatcattaaaacattattcagtgaattttttccaactacatataaacggagatttaccacacacattctttaccatggtgcaagaatgcctttataacatatttgaatcacaaaatgtgagtctaaaatacatcactgtaattaaaacactactttaaagttacaatgccccatgttatagtagccagatttgattaatccctgtataaatcacaaagcaatttggtggataatgtcttggctaactggcagcagcttttaaccgtgatattaaaaaaaaaattctttaattaagaaccagactttcacaatttagaaaacttcttcccttatatgtcaatattctcagtcaaaatgggatatttaaaaatttgagtctctaaaacagggaaaataaattcaaccctccctttacctgaagggatgcggttttaccattaggttcgtagaa

SEQ ID NO: 661 - DNA, 582 bp, Homo sapiens
  Genbank Accession No. AI769559
tttcctggtcagggctctgcctgatgaaatattttaaatggtatacttgaaaagagtagctatatttttgaagaattttcatcacaaagttatttgttagtcttgatccaataaactcttaacaataagccaagccaagccaagccaagagctggtcccaactgctatacagtgctctttgcaatcaaatctaaaattaattacccaagtaatatatttaaggaaataaataaaactgtatttaaatgcttatgaagtatatatcacaggctgtagagatatgtttgttttaccggcaaaatttaagtttcctttcacaggtcattctgtgtgcatgcatcaacacacacatatttattatttctccttctataagaactatcttgtttgaaaaatttggcttagaaatttattatagtgactacagggtcctcaaaataaaaggaggcacagctggttagtttatgaatcatgctgcattatcaattttaattgactagaaagagtagaataccctgtcacctgatacttcgaaccatctgcaccacaaaaaggttaatctgataaattcaccatcaattt

SEQ ID NO: 662 - DNA, 324 bp, Homo sapiens
  Genbank Accession No. AI770080
tttagcggggaggattgaagagagtgaggtttggggatccttctcggagagagaaaggcgggcgtcgtcccttgtgccccgcgcaggccgacgcgcttagccgattccgcacgttgggcaagtgggggcacagcgtccccgggcactccggtcccggcaggtcagcctctcccgggcagcgctcacacccagtcctccgagcctggggttccacggccgaaatgcctaatgcaaagattgcaaattgcttttcaggcacatttaacagcgactgtagctgttccttaatccaggcagggaactgtgctgataatcactctgcaa

SEQ ID NO: 663 - DNA, 219 bp, Homo sapiens
  Genbank Accession No. AI783490
catttataaaatggaaatacataactgagcttaatgtggatcaaagaaattaatatgtaaaaaaaatcaaacacagaacctgaaaatgataggaagtcaattattcagcctacctatccactactaaaataattcttggttatgaacttcacaagggaacacactgtattactactctactcaataacatgaatttcattgtgtatcttctggggcaag

SEQ ID NO: 664 - DNA, 419 bp, Homo sapiens
  Genbank Accession No. AI791182
ctactactactactaaattcgcggccgcgtcgacttttttttttttttctaacataggtatttaatgtacatgaaagcaaacagtcaagaaaactaaaggacctttggataaatgtttctccttggactcctggaatcgatttctgctttatattccaacattttaaagggtatttttaaagcctttagaggtacctagatttttatactcttctcatatttaacttccaagctaaatgtttacataatatgttcattataataaaaaacacaaatagaataaaactgaaagggctggaatagaagagaataacaggagactaatcttctactaatcatgagctgaaggttttgttgtgcagttacttatctatgcacataaacgtatctctggtaatgaggaggtcaaggatagaatc

SEQ ID NO: 665 - DNA, 393 bp, Homo sapiens
  Genbank Accession No. AI791632
ctactactactaaattcgcggccgcgtcgacttttagtcgtatccctaaaaccatgcattggtctggacaggagttgtcccatattcccttgcagactggtcactccatgttctctgttgcagtaaggaccagccaagcttcagctgtcccattcctccccctacaacacacacacctttcaggcaggaaggagatgagcttccagccccaagagtggaggctgccacatcctaacatagtatctattgaaaaggaagcagtgtgtatctatgattatatctctgttcatctatatatttttgacatgtagcaacacctctccatcttatcaaggaactcaactcggtctgggtctccccagtgcccagtggtggcctttgacaggtaggagg

SEQ ID NO: 666 - DNA, 516 bp, Homo sapiens
  Genbank Accession No. AI791751
  misc_feature (1)..(516): n = a or c or g or t
ttatacaagtaatacacaatctttgtagaaaaatcagaaagtacagataagaaacacaaaataaaaatctactatggaccaaccaatcataaataaccactgttaacattgaaaggagatgtatattaaaagaatagtatactatgactacatcagattcttgtagaaatgcagagatgtcttaacattagcaaatctattaaaacgattcatctaaagtcataatagagaaaagccagttgatcatcttgacagatgtggaaaaaagccatttaataaaaccccaacatccattactaataatattttcatcaaactagaaatagagggcataacctgaatgtataattcaaatattaagattattttacactaagagtcaaatttatagttttggagaaacactcttctaagtaaaaaaaatatatatatatcaaataatgtacaatatcagcacaattatgtaaatgttntttaacattgttctanaagtaccagtcaatgtgatgagttgag

SEQ ID NO: 667 - DNA, 523 bp, Homo sapiens
  Genbank Accession No. AI792405
  misc_feature (1)..(523): n = a or c or g or t
caaaagccaaaagcattggaggtcaagctgcccggtacatgtttctttacgcctgacctcctgatggactcactagataaaatgctccttcttgtagccagcaagcaaatgagtacttttttatggcttacatctgtgcctggtcggccatcaagtctgggtgccactgtttgagatttggggctgtttcctgcaactgatctctgctacagataaggcttccctcctgaggccaaagccctggttaacgttaagagctctatgatgatgcaaacttcagaggcgatcacctaacataacaaaaacctccccagaaccagaacctgttttttcaccaaaacccttccgctgcttgaataagaatgtcttttcctttcctacaatttgtgccatggaaatgtgaataatttttcttagcggggtaaatcatagtggttacttgaatgccaaaaagatgctggaggggcaggtggatatgttgaaaagatatagaaagctttgtaaattgctnttgaataaatat

SEQ ID NO: 668 - DNA, 495 bp, Homo sapiens
  Genbank Accession No. AI792635
aaaaccaagttgtcccaaggtgtcatgcagcctgtaatactgtttaatcagagtgccattttttttttgttcaaatgattttaagtattggaatgcaaaattttcaaaaatatgcaaatagaagtttaaaaacttttttaaaaaaagggggggactcctctttttaaaaccatcagatctcaggagacttattcattatcacgagaacagcctgggaaaggcttgcccccatgattcaattacctcccactgcgtccctcccacaacacatgggaattcaagatgagatttgggtggggacatagccaaaccatatcaaatccccacccctagaagaaaattgctgccattttctgaacatacctcatatgaagaagcatgtttatgatctgtaactgcacatctggagttcctccctgtacatgcttacatacatacctccccgccccacatctaattccttaaagttccctggattccatcaccttcggaagg

SEQ ID NO: 669 - DNA, 306 bp, Homo sapiens
  Genbank Accession No. AI792817
ttttgctatatagtgactgttagccagtaaaaacagggaagattgattaatttagaagaaattgaaagaaaatatatttattaatgttgcttttaaatgcaaattatcagattgaggagaattttgagaccattgacatttttctaattatgactaaaatttaatcactatacttaataaacatactctattcaaggtcttgtaataaaattatagggaggaataaaacataattgaccccagcgacatcagcaaaaatgggtggactaggaagctgcaagcttttgtttgcctatcaaaacatta

SEQ ID NO: 670 - DNA, 481 bp, Homo sapiens
  Genbank Accession No. AI795953
ttagttatttctgattttatttataatataaaaatgttcaagtgtcaacagtcaggtgttcagacatttcaggacaggattcccatctgtttctgtttgggattttttttttttttaaacaattacctttttgacaaattagcagtggacccagtttttgggggtgggagggcaggactggagacgagtggatgtcataggtgggttgggggctaggaggcagcctgtgagaaggaaatggtgttactttattgctaaaaggggaatacactgtcgagtggctcttctcggtcccagcgtgaccatgcatccaatctaaagaatctgaaatgcaaaggacatgcaggtgtaaaatagaaaagacgacctgtaaacgaaggtgctgtgagtagccagggcttccccattcgggtagctgtgtctttatctccccctggaagttaccccagctccagctccaagcctagggtcctggccctct

SEQ ID NO: 671 - DNA, 558 bp, Homo sapiens
  Genbank Accession No. AI796083
aaaggtggtttttggggatgtttaccctattgttttttatttggatgccctaaggcatataaagcgcatagtgaattacctactggaatgtaaatggttctaaaattaaaactgttaaaatagaaagagggaaaaggaaggcccaagaactcttaaagagaggctgagaacaagaacaaaaaaacccagaagtgtaggtaatacgtaacagcgcagacagaaccgttgtaggccatgtataataaataatgcatgccccaaatttcagttaatcatataatttcaacttgagttctaatactggaaccagccaaccacttgggcttcaacactgtactagatgtcagtagaatcgcttgatggaattacagccttgttacagttgagatcaagagagggtgctttttttttttccttcttttattaaagctatcattccaggctttgatcaaagatccaagaatatttgttctaccaggctggaatgaatgtggtttggaagttcagagtacatttaaaagctgcaacaaaatataggtagccaacaatctcagaatt

SEQ ID NO: 672 - DNA, 555 bp, Homo sapiens
  Genbank Accession No. AI796210
  misc_feature (1)..(555): n = a or c or g or t
ggaacatgnctaatatttatttgctatgctgaaaataaaggcacttcactgctaggcaagaatatatctgtgactgaacagttttctccaagaatccaatatttccagtatattttcatatactttcttatctctaatactcctattaaaggaaactattttcaaaattaagagacagtggtgacaacatcatcatcctgggtttgtaccttgaagcaatatactcaatgagctctaaatctcacattcactagtgatctgcaagtgaagctgaataaatatattctctttgttcagtcatggaaactcaacattagaaatgacatgtgggaatagatcaccttctctctagactaatatcccatttctgacagtggtctccatggcccattggggcttataaagtagctgccttctgtgacattctgcttgaagacaaaggctttgcccaaacataactccttttaaaaaagcacaacttgtttaggcacacagaggttaagtgacttacacaaatccacccaggattgtgattggcacggtctaatctactga

SEQ ID NO: 673 - DNA, 506 bp, Homo sapiens
  Genbank Accession No. AI797063
gcctattctgactttggatcttaactattttcaactatctttttgcttgtagaggcattctttggttcctaagaggtattaaagtgagggattactaacggtgaagctactttggcatgcaggatgctgctgtgtacatatatactagtgtatatgaatataaacccttgtcttttttttttttaataaaagtgagttttcatctgaggtgcttggaatgattcacaaacaacttggcacactcttctggcctgtttacccccattgaaatgttattttataaattacatcttaattcacagaattttttcttgatagtataagaaattctcaaatattttctataggggcacacaactttctatttaaatgtctaagaactaaattttctgtcgccttccgaaatcctattcttaaaattaaaaatataggaaagcacaaatgtttccttcattaggtcaattttttcactaatttcttcatttaaaaagtgaattcttttcctg

SEQ ID NO: 674 - DNA, 516 bp, Homo sapiens
  Genbank Accession No. AI797276
ttttagttttcttggaataatgtttatttaaagttacatttcagaggaaactatcttcaggagggcatgaagcctatattggctactgcaaaacaaccagaagttttataaaatatttctgatttaaattactaaggcactatagataggcacctatattacatacaatcttcaaacatttttaaaagttgaaactatgtattagttgatatctaaaatattaaagcccctgacaaactgaacggctaagaacttgacaaaatgagatgcctgtttcaatgattctgttgccagcatattaattaaaatacaatttgagattctaaattacacgatccagccttagtccagggaccttgtgatgatagttgtattagacttcaaaacaccctttccgcaggaaagggcatttttcaagatggcaactgctgtgtcatcattttcccttttctggactgtatcagaaatccttcagaaagccctacccttaaatgcacagctgcttttcccaactgc

SEQ ID NO: 675 - DNA, 585 bp, Homo sapiens
  Genbank Accession No. AI797788
tggcttttacaaaaaaggtttaactgaagagtcttttaaaaaggaagcctctctagttttttttgttttttttttgtttttttaaattacatataacttttcagggatttctcatatatacaaacatttaacaattttaaaacacaaggtaaggattccactagagataaacatggctcaacttcccaccagctttcgttttcctttctcttgtatcctccttctctttataattctcctttaaaaaattttttcattccctacatagctcatgaccccaacaggcaatatgtatttcttttactaaaaagaagtggataaaatattgcttagatttcgtctaggaagcaggagaacaaagtaccatgttttttatttcctaataccatataagtggtaaaggcaaagttttaaaacaaagcatcagaaactaagaatagaggatatggttattgttcttttaacttgtaatttcttctaggatacttgtcacaatttttcttttaccccaggaaaataaatagctataaaaaacaaatgttagttatctcaaaaatgttctttacttttatgcactcctccttc

SEQ ID NO: 676 - DNA, 561 bp, Homo sapiens
  Genbank Accession No. AI798144
tgagacagtctcactctgttgcccaggctgtggtgcagtggtgtgatctcagctccctgcaaccagataattcttaatgacaatattcttacttgtatttttcaaaaaagaagggtattcttagcctgtctattacttttgtagttaaccattcttttattattattttagctacaacttcttttcttaattctgagaaagggcagttataaaagaagaacaggttggcttaagctagtgcttaagactgtatgtgaagcccttcaggtattgtttaaaaatcaaacagtgcattgtataaggacgtgtacatggtaaaacactaaagaaaaacaaggcgacaattaacaagaaattcaggacagcaagaagctgtggatatggttgacagggaagaagtggatgcctctgggaaggctttgacggttctagtaacattctgttcctcacactgggtggagagtatacaggtgttcattttatttattatgctttaaaatgtacatgtacactacctatcttcttttgtatgtatgatatgcttcacgattaaaggaaatg

SEQ ID NO: 677 - DNA, 713 bp, Homo sapiens
  Genbank Accession No. AI799107
tttacaatgatattagtacatctttatttttcatttaaacacttaatatttacaaaacattaaaccactcaattttgactattgtatcaaaagtgatatattttgcaacatatactgtaatttaaataattctattaattttcaaaaagtacatttaattaccatactaattttcaaaagaagagcaatggaatgtcagaagtaatctttcactatgtgccagtagcttgagtggttatattctgaaaaatgaatgacacattttctgttattctttcaagaaaaggatctgtaagatttaaatgatctccagaaaaatgtttccattgcttcagctgggacatagaaagaggtttcagggagttagatttctggtgatgtggaccaagctgacaatctctagagacaatgaatttttccaacgaatcacctgtatgaacttcttctcctgtacactcacagtcaagcagatcatgagtaacacaatctgaactttcatgtaatgtgaacacatttttaagttcttctactgaaaactgaatatgttcagatgtcttggtgaggtcgacaactgccccacacagaccttgcttactgatctgcctttgatagatcttctcttctattgtacctgtagctaggagtctgtagatatgtacaggatatttctcgacatctctccatactctagacattgcctgaatgtcagtcgc

SEQ ID NO: 678 - DNA, 382 bp, Homo sapiens
  Genbank Accession No. AI799784
gtgacatgttttttgctttattgaaattctctcttacaaaaggtctgatgtattttaggccaggcctaatttgctttggtccctgaaatgcaggcccatggtcatttccatgtcctctgaagtaggtatgtaaactagtagacttccatttttaaggttcacacactttttaacattgtttttatttgatgtaaaacaagacttatgttgtccctaatggaaagaccaagtaagagagttatgtgcgtcttcatggaagggataactggattctttgccagaaccgggttgggaatttagtttgctcaatgtggcatctttcacctttagttttttttttttttttttttaacttaaatgcaaaccttgcaatgtgctgagc

SEQ ID NO: 679 - DNA, 540 bp, Homo sapiens
  Genbank Accession No. AI799976
  misc_feature (1)..(540): n = a or c or g or t
ttttcaccttttttttgtttatttatattctttagttttgtgcacactttgaggaattgatttaggacaggttcatactgaaaaaaacctcagctgatgttatctgtgggggctggggagggtgtcagggacatttggtggctgaggagagcgcgtcactgctattgaatagctccatttaacaccagccatgtctccgcgtctcaggcacttctgtgaaatgttctcagaaccctgtggtgactgcggcacacccggcaggccttgctagcacacgccgcccactggcagggcccggccaccctggctgttgccattctttcgtagggttttgttcattttactatttgtcatttttctaggaaacatctgtttttgtaaaataaacaagggggaatcaagtattttaaccacaaagtataaatactggctctaagctttcatcacttcattgacaaactgaatgctgaggaggctgaaggcgaggaggctnttgcagatgtggaccttgagctgcgtgtttgggagacgcacaggcct

SEQ ID NO: 680 - DNA, 439 bp, Homo sapiens
  Genbank Accession No. AI800529
ttagagagagggtctcactatgttgccatggctggtcttgaactcctgggctcaagcaatcctcccgcctcagcctcctgagttgctgagattataggcatgagccactgcacccatggtgcctaatttctgcctgatatgctgttggctcttggatccctggccaggacaggacatggaacatgggtaagggccacagacccagcagggctgctctcgaacccagtcttgcttttgcagaaagagccccctgagaaggcctgcatgaggcaactgagtgaaacagaggcaaagcaaggaagagagaagaggtcaagccttaccaagggcacagagccaactgcccagagcaagtgaagtcagagagatgggaatccccaggaaggaaactcccaggaaggagggactctggggtatcacagtcataaaagaacaggac

SEQ ID NO: 681 - DNA, 659 bp, Homo sapiens
  Genbank Accession No. AI801545
  misc_feature (1)..(659): n = a or c or g or t
gttcataatattaagtagcccattaacctttccctttaaacaggccttttgatgttagttcttataccaaaaaaaaaaaaaaaaaaaacccaaaaccaaaaaacaaaccaacaatacatgaagatgtaagggaagagattaatgagatacaattcattaagtataaaaatatgttgtttcaaattcagaataatttaataactcttcgttatttcatatgtatctggaaatgggacagatacgtgtcctgatcctgtcacaagaggtagaattccagcatttggtacgacgttccaagacagggtcaaagtgacattcctgtttcccttgagaccatttccatcgtcaaagaaaaaatattttgttttcatatctttcagcagcagcttcggattatcacctctcaaaacaatcttgtcccataggacaacttggttcagagcattattttttgttgaatattctgctgataaataaagaaacaactgcttaacattccaatcaaatatattctctagatcagcagttatatcaaatgtgataaatcccagatcacttctttctctaggtccagtgaaatcttctacattnnttagcatgatccgnngaacgtgcagnncgacccgggacgctcctgtctttgaanggcngtgtatgaa

SEQ ID NO: 682 - DNA, 470 bp, Homo sapiens
  Genbank Accession No. AI803208
  misc_feature (1)..(470): n = a or c or g or t
tttcagacatggagagagtgtctttattcctaaagttggtttctcagccgcaagggcaatggccaagcccttcccaatcttaccttacgaaacaagggtgacaggcattcagggatagcaaaacgatctttcctatcctattttgtgccttagagaaaagcgtaattgtgcatttaaactgttgtttgggatgagggcagcagagcacacagctgttggaaccagtttctcttcatgctatcacatgaggctggagcctgaactatctctgggaggctgcagaaagtgggaagggagtttcagatccatgctggaagaacagggaaaggctcccgcagggctccgggtggtgtctgccgctgattcagcaaaggacttgtcctggacacggnggatgtgggagctgagcacgggatttcaggtcctgcttcacctccttctcatagggaagaagctgtccactgctcact

SEQ ID NO: 683 - DNA, 484 bp, Homo sapiens
  Genbank Accession No. AI803648
aaaggtatatattttaaacgtgtgtcgtctacctaagtaagataatagtctttgaactaggtactatgtttgctgtttgggtgatgggttcactagaagcctaaaccccagcattactcaatatatccatctatcaaacctacgtgtgtacccccctagatctataataaaagtaaattaaaataaattaaataccagtcaactatttggttgactttggttgtactgattaactggaaatgtgcctctgaagccacacagccagagcaactggctttttgtcatttctaatgaaaagccttgaaagatggttctattagataacgggccacactgaagctaactgtgcatctagatcacatcaaagcagtagaggtgagatgttagcacagctttggtttctgcagttctcacctcatgcttgtaagatgtttagctgtgtcaactttttgaattaatgtgggttcttagccttcatagaccc

SEQ ID NO: 684 - DNA, 459 bp, Homo sapiens
  Genbank Accession No. AI804054
gcaaggtctctatcctgggcctatttctgattgtgttctgggattttagagaattgaacaatagagtatttaattttaccactcccctcttgagtaaaaacatcagacacttttaggaaagttttagaaggtacatcttcaataagcagagatctttcatctcaaataactgggaagaattgcactgcttaagaatagttgaacttggacctgagagcaccatacttagaaatctaagtatatttaggtcactcatctaacactgggactttaccagccctgtcacccaaactggttgtagttagtaggaccacaaagtcactgaagaaatctgctttcctttaactttcaaggcaataagaaaaatgagttctctgttagcagtccctgagctatctgaatttcgtgtttctctcttaagcctcttgctttggaggatgatgaatcatttcctactcc

SEQ ID NO: 685 - DNA, 535 bp, Homo sapiens
  Genbank Accession No. AI804914
  misc_feature (1)..(535): n = a or c or g or t
caaaaaagtaggcaagtactttgctttattgacatcaaatggaacttcttgtccctcacgcagtccacacaacagtaaaggcacaatgaggcatattaaaacatagccagtttcaacagcttggatatttcctgccatggaaaagtatcctgcccacagattcacattaacatacatggtacattaatatcaatctctatcatataccaggccacggtacatgtttgcacgcagggtcacgttctgcaacaaacttattctaataacagtattcagaaggcaccctatgggacacaggtgacagtgaagttacgaggctagatggccacatcttttacatccaagaaccgccctggggccacaccccaaaacactatccctatcccaaatcacctaacaaaaatgagagctgggaagggcgcaggtgagcagtgcatctacctaggtaatactgtctatgtctaggtaatactatgtaattttatcttcatactgcgtgtggagataaaaaacacagcttctnctgcacctcttc

SEQ ID NO: 686 - DNA, 574 bp, Homo sapiens
  Genbank Accession No. AI806221
tttttttttaattatattgcattttatttagatgggtgaagggttgccccaaacagaactaggaatcaaatattgtcttggactagaggtaattgctaagctggaagcttatattgaaaactaaaatttccagcccttgactatctgtagttccaaacatcaaaggaaaatattggaacaatttatctatgtacagagagaggcaactcatgggtaccataagcaaaataacctgagggggaacatttgatattacaagaagtggtgagagtttacaagtcttgcattgctttctattgtacatggctctgtagtaatgccaaaaataacaaaatgtaggcacttgctctgacttctgcagtttacattagattattatgtacttcataaattaacagcagctttagaattataaaacagtattatatttcatgctactgttggtgttcttcttgttaaaataatgttctcaacggacacagatacagagcttgtacagaagtaactctgggcacatccagatagtacaaaaagcagtcataaagcagctactcatggaatcgcaactgtgatg

SEQ ID NO: 687 - DNA, 559 bp, Homo sapiens
  Genbank Accession No. AI806324
cacttcagaatcatcttttattacaggcaatgtattgtaaactcgaacatccagaatctgagttacacttattatttttaacattttactcaataaaaatctgatatactgggtccaagtgatgacacattccaaattaatgtaactttcttgcagcttaaataaacaaatttagatcaccaagtgaaatcaaagccaagtgtatttgcacaactcaagaatgatgtgaatggattagaatctctcatagtgcatacttcgccatttatacacaaactttgagagtcttctgagtgacatggtatttaactttgtttccaagggccaaatactaaaatgtatagaatatcctactctatactcactattaaatgtcatggactaggaaatctgagacacagaataagaagcaactgattacacaccctagtcatttaagttggaagagttctcttaggtgactctgggtcaggccatcttgatgagccttagacaagttttccttcccataaatcctgctttctcaggcagaatcatataccgtaactgaaaggaaatg

SEQ ID NO: 688 - DNA, 481 bp, Homo sapiens
  Genbank Accession No. AI808768
tttatttgtccaacaaatatttattgagcaactatcattggccagtgactatcccaggtgttagagatacaaccacaaacaaaatagatgcaagtccctgccctcatgggacttacattctagtggaaggaaacaggtaacagacaaaatatatatgcaaaacagataaataaagtgcatgacatattattggatgataagtgctatggagaaaaacagagtaagaaagaggatagaggggatggatgtgcaggttgtaattgaagacctaaagatgaacaatcaaactgcaaaactattacagaaactatctttacatcaaacaagacacacaacacagccaaaaagattaactttacttctgccaacattaaaaacttatatattataaaagatatcacaaacaaaaaacattgactaggagaagataatggcacccaaatagttttcgataaatgattaatattgataagatgtagag

SEQ ID NO: 689 - DNA, 510 bp, Homo sapiens
  Genbank Accession No. AI808983
gattctggctttatgaaactttgctttaacccaacattgtttaaatcccgacctggtttctcgtgagcttgaagccagggtgcccacactctgcaaaagaagaaaaatgccagtatgagtccttgaggctcagtgttgttgtgcagtccgtggacaggacaatgtcctcatttcaaggtttcatttttggaggaaaaaaaattcctcaggatgcaggatgccctgcatcccataatgggtatgcccccattggaaacccagctctgggagggtgaccaaactaaaaaggaaacagttccaagcagaaggacacaaattaccagcagagtcattattactcacagcaattcaggcccagggtctatgtggtgcagggtttctgaaagccggcctatacctgggaaggagggagagaaccagaggcctggatgctgggtggaggttctgtgatttactttgttacaaatttaagaataaaacctgctggatcaggagcttttcctatctcct

SEQ ID NO: 690 - DNA, 566 bp, Homo sapiens
  Genbank Accession No. AI809925
tttttggctttatagactctaaccatttatttaacaaaatggaaatttctaatatatagcacttttctacatttaaaattttagggaggagagactcatgttctacagtatacattattacaaaagagttcattataaatttaaatcagctgaaacaattcctttaatgattaggattcatcatcctttagtgcagcgaggtgacattttgtggaaagcatccatggctcttcgtcagagatgtcttaccagcacaaccttccttcactctgacctgtccatcagaggatttcctttaccagtaaaacagatggaagtccatttttctctttcggttcccaactcaagtgtagatcttttaatttaggaaagaactcaaacttatataaactaaagagtggaggttgttgttttcattctgtttactcacacactgctctgtaaagtcaaggttttcttgtcgattttgctcacatgctgattgctatgcatgcagccatcattagtgcaaatgcgcgggagactttttgaataatgtatagcacctaaaggaatgaacagcagac

SEQ ID NO: 691 - DNA, 615 bp, Homo sapiens
  Genbank Accession No. AI809953
  misc_feature (1)..(615): n = a or c or g or t
gtcgttgcctctcctctctccactcactctccgcagtcagagttacaagcttatatggtcaaagacaaaaataaaaaagaaaacgtataaaataacaatagaaaaagtaatacttctgggagaggcgccgctgcggctccgcggagctttcgttctttttttaatgcagtttcccttccgccacgtgagtaccgccttttggccaagagtttagccgcgtcctaggggagcagcagggacggtcggggtcgcggccccgggcggggctctgaagtgccgcgtgcgccagggacccaggggacaatgttggagaggtggaaggtcccgagcgagcgcctctcccgctgcccgccagagtcaggcttctggtccctatggaggagagggccgctgggcctagggtccttgtgacccacaggttctatttagcatttgatcttggaggttttgagctccttcacctgtgagtgtagcgtcttgtggacagcgagagtcctggactggcagaatcctttcccacactcttgacactngaagggcttctcttntgagtgaatatatctgtgtcttcgcagtgtcttgcctccggaaggctttgtggcagatgtcacaggg

SEQ ID NO: 692 - DNA, 723 bp, Homo sapiens
  Genbank Accession No. AI810042
  misc_feature (1)..(723): n = a or c or g or t
tttgaagcggaggtactactttattcaggcagggactacccggcctttgtcacagcgtggggtgtatggggggagtcaccacatgggagtgccgtcacctccattagccacaggccagacggcccaggagggcgtgctactgcagtgagatggggcactactgcagtgaggtggcgcagggctggtgagcttgggcacaaaagccagcatgtcaccctccctttggagaagcctctgggccaaggccttttccagctgacgggatgcggagggaaggggacctagtactatcgggattcagctgacttagcctatgagatggagcaggcaagagattccctttgcagggtgggaggttatattcctacagcctccattcttggagtaggctcctttgccacaccccttttcaccttagcgggccaggcctctcagccagaaaccgtatgtcaagagatcgtaagttaagagtgctgctcctgagcagggagcgggcttggaggcgtccttcctctccccgcacccctaagtccccagtgccgggcagatggtcttttcctagtcctcccctgaggaccaggactctctatctccttccctctgagtgaacttcaggaactgacgctggcccaggtgaacaggagcctctgcccaagaggtcttcagagcacttccctcctccctctgaaaggtgcttcctccgtctncctcanagactagcgg

SEQ ID NO: 693 - DNA, 553 bp, Homo sapiens
  Genbank Accession No. AI810266
tcactatttactgaaagtttaatgaaataaaaaatagaataataaaacaatcaaggaccaagggataatcaaaaccaagtacatttgaaaaagaacaaaatagaactttgctatactccataatgataaaataaaaatccaaaaataagatgtaacattcaaaaccttatatgcacttgactacagaaccactactatgtcaataaataactgacagaattagaaggagaatttcaaatttacaattgtagggtaaccctttcataattctgtatgagtgttagattctcatattacaagcaaagaaaaatgctaatggttttctaggatttgaacaagacaataagcaaatttgatccatgattaccttcatttgacacagaaaacatcccttctttttttcaaagcacacgttggacaatttcaaaacaaattaaccctggtttcagaaagttacagaaattaaggaacataactacaaaaagggagatataaagaatgacaagagaatgctgtgtaacttttacaaaaaattaaactcagtggaaaataa

SEQ ID NO: 694 - DNA, 568 bp, Homo sapiens
  Genbank Accession No. AI810764
aaaggcacagctttcccagtgtttgtgttccttgcttgcgccctgttttaatgttgtagttacaggtgtccagcagggaggaatgcagcccctgtgggcgcttgggggagctgctgggaatccaagttcaaggagcagctgttttctgttttctgttgccccacagcgccacctcctggccccttggtggtgatgattttgaagtcagcaggttctggtgggccgtgtgaactccagcagctctgggctgagctgtggaaacactgcgtcctttgaaataatacagctttcctgagcccaccccagtccctaaagactgcctctggggttgagattctgagatgcttgacagcatggcttttcccggtgttatgtgtcgtttctatccttaagcctgttaggggtggactggaggctggaccaagctccactggctgcaggaggacccttctgtgggctccaggctggccgtgtgcgtgtggggaggtgggatttgctgctaggcttcatgatcactgtgaagaagcagcccccaagaatagggtgataggccctccccatgtcaccg

SEQ ID NO: 695 - DNA, 455 bp, Homo sapiens
  Genbank Accession No. AI811688
ttttttttttttttcttataaggggtttattgagagctgatttgtcaatcaaagaacacaccataatgatgggaatattgatgatttcaacataaaaaaatttaaataaggtcaatctttacatagtaattaggagccacttacaagatgtatcaagcaaacagagcaagatacagaacagtgtgtggttggtttgctaccatttgttttaaaagaggggaaagaatatatatgtgctacagacatgtttatatgctatgtgtactcctctgtacatgtgcttataccacatgtatgtgcatatctaactctgcacaaccccgggaaaggcaagtcgacgctgatgtcattgctggctgaggagagaggtggtggctgtgggacagaatgggagggacgtatccctacataatacttcataccttttagctttgaaccatgtgcaattattacct

SEQ ID NO: 696 - DNA, 539 bp, Homo sapiens
  Genbank Accession No. AI813866
  misc_feature (1)..(539): n = a or c or g or t
ttttttttttttttttttttttttttgcttgggggaacatggagtttattcaggggtggggacaggcgggcggctcaataacaggtgccgtccacctcccccatgacaacaaacacattgacatgggtgggtttaccccccaagcggtcgatggtcttctgtgtgaaggccaacggcagggcctcgtggcccaccatgcaggaaaaggtgtcccccttttttcantcctcggttgccacgcccagtatgctggtcacaacaaaggtggtggtgccctggctgggctcctgccgggatgcccaaatcaggtacttttcgcggggcaactcctgtgacccctgcagccagcgaaccaacacgtccttggggctgaagccgcgtgccaggcacgtcaacgtcaccagctcgttcagggccaactcctccgacggcggcggcagcaggtggacctcgggccggaatgtgtttccggattttgagagggtggggttaacgggtcttggactcggggangccagcatgcaagtgaaggtcttccc

SEQ ID NO: 697 - DNA, 408 bp, Homo sapiens
  Genbank Accession No. AI814178
ttttttttttttttttttttttttttttggttataggcatttattgaatttattcatttattgatttgacacacttccccactccaatctaacacatgatacaatctgggtaggccaggcgctgacacaggaaatgatgggaacccacagcaggggtgggggaggggaccatgcaaagggcactgggggaagggcttctttgggggctgggggggaaaaaagaaccccaaatggccctcctggcaggtgctagtaaacctgatccacatccccccccatccgtgctcatttcccaaaccctaagccaaactccccagcttccccttccctgttccttccctccccgctgcctgctgccacacacacttccacataacccctgcggtcagggaaggggaaaaagggcag

SEQ ID NO: 698 - DNA, 492 bp, Homo sapiens
  Genbank Accession No. AI815028
tttttttttttttttctcaatagataactttatttgaaatgaaatgcattttgaaaatatgaaaaataaatcacatctccccaaaatcatctaagagacatatttacacaagttctgaccatgctaaaaaattcatgaatgtgatggtgtataaagcatttggtacatgatgatacttgctttccagaagctggcatttgcatattataaaacgttaagaagaaggctgacctcggaatgtaacagacaatagttttatgtttcttctcaatatacagggacctggaaggactccctgttgttaaaacctgcttccccactgctcagcctgccatcagccatccagctgcagagcagtggagagtaggtctcaccagtttttgtgcagatgcttctaacccagagtccttctgcttacttcattggacaatattgccctttctaagaaaacccttttagatcctgtactccacttagcaaatgccctgccag

SEQ ID NO: 699 - DNA, 484 bp, Homo sapiens
  Genbank Accession No. AI815057
aggcactttttattttccaaaaaaaaaattgtcgttaatatataaacatctcattctctcaaaaaattctacaactatacagctgtttgctccattatttgcataggaaatgaccacaatacaaaaataagagggaaaaagaagcaaaacagcaaccgatttctgcttttcatgtaggtgtgtttccacgtataaacattttgaagcctcttacaaaattatttacatcgtttgtcatctatttacatcttttaagagcaacttttctaacaaacaaaactataatttatcaagttatgaaaattgtcttctaaaaaaacttactatattaccacaaaataaataaagataaacaatattttaaaaacaaaattaaattttcatttcaattaagaccccttttggcattttgcttatttattctgccctttggttaacagcatcagcatcacattactattttatattgcatatatgtagcatt

SEQ ID NO: 700 - DNA, 571 bp, Homo sapiens
  Genbank Accession No. AI816806
tttgaggaatgagcaatttatttcaataaagagaaagcattaattttgctacagtgggaaaaaatgaactcaagagttgctacatttaactgtatccccatttatctctgcacgatgtctttatctcagtgtctcaattcacactaaaatattgaatgagaaatacaccacgttggctgattgcttgacatgtctgatttagggagacttctacaaccactcctctcttttttctcccagtaaatacttttgactttgacacctaccatattggaaatgacaggtgcccgagggcaagtgcatcaaagcagttaggattcgaatgcttgctaaggattatttttttaatggagcagttctattgaatcctgaaaatgcagaacccagtgaatctcctttattgtgaaacagaacaattcaaatgattgcaagccccagaacctaacagagaagcacttaaacatttagaacaaacatacctatttttcaaactttggcatttttgtgaagtacacttatcatctaaatacctctctcccgtcttctcttttacaacataccatttcaacct

SEQ ID NO: 701 - DNA, 525 bp, Homo sapiens
  Genbank Accession No. AI816835
ttttttaccaaaaaagctttttaatgcactatttgttttccaggcaaaagatcttcagaaaatatccgtcatttagtagacttacaaatggcacttttggctacataggagaatcagatatgagacccacgtgttttttctgataagctagtagtaggtcagctttataatacaaccctttcttagaataaaaaatgactaatttgttttaaaagacaggaaaagctgaaaccctaaagtcattgttttaaaaaatgtggggccaggcgcagtggctcacatattcaaaagaaaataatatttggaaatgtaagatatcaatctgaactgaaaacatttttaatattaattcctgtctctccaatgcagccaactttcatatgatagtgtgaggttgatcacatctaatctatgcaaaaatgggtatcttcttcatgttatccaccatttctcaactagtctctatattaatttacacaattatttcacagagattaataaaacatcagataatagaatcaaccc

SEQ ID NO: 702 - DNA, 572 bp, Homo sapiens
  Genbank Accession No. AI817448
ttttttttacttataaagtcaaaaaagtttttattctctgatatataaaaccaagaaaactttaatacataatatgcatagttttgtttttttaaaaggagaaagtggcagaagtacagacctgtgtagaaaaatacacccaagcagctgttctaagcagtaattcctaaaattatgaatagcacacaaatctcagtgaaagcctcatttcttaaaaaaaaactcacatttgcttaacaacttaaaatgtgataagaaatataaccttccttcttgatagccgacccagttatataacagacattcaagaatcagcaataacttacttagtaaaagaacatttcctttgtgagggtaacattattagttttagttccacaaaaactgcttctgactgctggggcactgaacgacatgcccttcatcagagagcaagtccggggggtgcggatcctcaccggagaggtcatggggaagcatctttggtcttctcttgcttaggaacaaagggccagcaatccattgcatacaaataacatcaaacacaggtgcaggaattcacaactcctcag

SEQ ID NO: 703 - DNA, 548 bp, Homo sapiens
  Genbank Accession No. AI817698
  misc_feature (1)..(548): n = a or c or g or t
ctctcctaactttttcccacatctcctgttgccctcattgcccctcacaacaccacttgggaaaggagcagcccccaccccctgcccgcccgggcagccccgccgggcacgctccggcccgggcccagctggcctgcagcttccgacctcgcccgggcaggcgccccgcagaccctagctcccacagtcccacagagcccgagccctcgactgtcgtcgagggaaagggcacgtgggccggacagggagccccttctgcttcgctctcagctctgaccctgtttagccaaccgaactgaaaaatcattgcactttgaccgcgcgtcacgcccggcccacccggccccccacccccggggccttactccccacgccccgggagactcccgcaggatccactgcccctcagccctggggtcctctagggctgcacgctgaggacagggggaggaaactaccaacttgctgagcgcgctcctgataatgctggtgagggtcaagttggcgtctggctcanagaagggcgctcggggcggagagggagggag

SEQ ID NO: 704 - DNA, 469 bp, Homo sapiens
  Genbank Accession No. AI817967
  misc_feature (1)..(469): n = a or c or g or t
gtcattttagtggggaaacccttcttttattctttggtctcccccttttttcttcgagatcactgtctgtccctccctcgtttaatcaccgccatataaaggaattcccactcccctccccgcacattgtcccaccggtggggaaatccttccccgaggccaagagaagtataggaggcagcgacggcaactgcaccgacggcaacggcagctttttaccccgaagcacggtggcagggaggcggcgttgacggtggctgcatttttccggctgcttctccccccgacctcttccgtttcttgctcctccatcgagacagcactagactcgccagctccgcttttatccgngtgcccccccggngggannaagggnccccccctttgggnnnccgcactgagcctcctcacccctagtggcgtcgagtgacaccccaaccgggttcacccagcgctggaggccagactg

SEQ ID NO: 705 - DNA, 793 bp, Homo sapiens
  Genbank Accession No. AI818248
  misc_feature (1)..(793): n = a or c or g or t
ttttttactattaaccatgggatatttatttaaaagccataaagaatacgaaaaagcatgaacgcgcaaattccagagaatttgttttttaatcaatccgatcaattttacacaacaaaatatcattaagaaacatagaaatcatgtgaattgtattaaaactatgacatatgacaatattatataaagaaaagtttaactctaagagacaaatcatatttttttaaaagagaagttaagaatatcacgtcttatgctaaatatatatagatatatttattatgatgcagcaggttttggaatacagggatttaggcaagttaaaaataaaaagtttatatgcttaaactttctgaatattgtttgtctgatttcctatttaaatatcagacatcattataggaaatacatagtctacttacgattgcaatggcactttcaaatataaggcaatgaatattctagaaagcagcaactgttactttnttgaaagaaaaaagctagtcgcaggatgtgaaaatgagcattacgagaaactcagagnaacagatttaccctgagaagatgaatatatgtaaaaactaagcacctttcatttcanaaagaactgtaggctaagacgctcatctcagaataacctcatctaagaacactcatgctttctttatttatgagcagcagcngaagatacatccattctcatactgactgtgtaaaaaaaaatgcgtccttttgaggtganactagtgcacagaagcagtaaattaatgtctcattatcacttgcttngata

SEQ ID NO: 706 - DNA, 516 bp, Homo sapiens
  Genbank Accession No. AI818579
  misc_feature (1)..(516): n = a or c or g or t
tttttttgctatcagtggtgctttatacaaaatagcataatctgataacataagacattttagatttatgtttttaaatagccaaataaaacaaaatatcaagtcacagattacatatatttacattaattcaaatgtccaaagcacagtacagtagggtctatttaatagttcacataatttaagatttacatatacacaagcacatgaaccaatattaggtttgctagaacagggatttaagaagttactcagacattttggtattgacacttacatatttatggcaacaaattatgatgactttaaattttcaatgagatcttttgtacaagaatacagaatgggaagaatgtacaaaatgaagacaggcaaacaaatgtactttccttgcactatttctataacaccatataggatgtggcattatccagtacattttatcagtgtagtctattcattctggtctaaaacggtaattntggctgaataacccccaaatctaactttgcttta

SEQ ID NO: 707 - DNA, 460 bp, Homo sapiens
  Genbank Accession No. AI819198
  misc_feature (1)..(460): n = a or c or g or t
ttttttttttttttaaacgtctgacactttctggaatgatccaaaaagtcctgtgttgacacatgtttaatttcaggaaacacagaagtcataatttcaatatcaatagcaaacttcacaacgaaactgcaccgaacgtcacaagagaccaaaatatttccacagttgatcttggacagtaaaaaaaatactaataacagaagaatagccgctgttccagcagtccccgctcccgagggagccgctcggattcccaccgggtccgctcaaagaggggcgttgtcctcccccaggacgcacagcccgcgcgcggccagcccactgctccctggcttttgcgccctggcgggggccgggtgggaccccaagcggtgcaactccncgtgtggggctgcggggtccaagggtccgggccggcgggggcggcgacggccgggtatgggcccgacgctccagcgcc

SEQ ID NO: 708 - DNA, 539 bp, Homo sapiens
  Genbank Accession No. AI819340
  misc_feature (1)..(539): n = a or c or g or t
ttttttcaattttttttttttttattctgcagattaaagacactcaatctttaaccttgaagggcaggcaaaaggtcggctatgctgtcaacataaaagtcagggaccattttctttttaaacacgcagtcactttcctgattattcttcacatcccctaaagtggaaactccggtgagggtcaggatggtcttcaggccacaggtggcgcctaggaggatgtctgtgtccaggcggtctcccaccatgacggtgcgctcggggttgatgccgtattcctgggacacgcagtcgaaaatgaagcggttgggcttcccgatgatgtcggcctggcgctgggcggccatctccacggttcggaccaaacacccggtacccgcgatgaagcggccgttctcaagcggaagccggttgtccatgttggtgcccacgagcaggcagccgggctgctgcaggtagcgcagggccttggtgagcttcatgtagctgaagtgcgggtcaaagcccaccaccaccgcgcgcacgtngggctccagncg

SEQ ID NO: 709 - DNA, 487 bp, Homo sapiens
  Genbank Accession No. AI820661
  misc_feature (1)..(487): n = a or c or g or t
ccatctgcaatttagggcctttattgaccgaggagggtatggaggtttgagggccagtgagcccaccatagtggagcctgacctcagcaggccactggctggagctggaagtctggggggacactgcccaggccagtgcactgcaggtgaggttgatggtgccagggcgtaccacagggagcaggcagaacctctgtaaggtggccgtaaggaataggaagatacccgagtgggccaggcctgtgcccaggcacatctgctttgccgggtacacaggtgcacagtgagcaccaggtaccccagagccagtccaggctggtccccttcctcctctgcctgcacctgaggcaaagggcatgaaagcatcattgtcctggaacttgcccttgtccaggaagttggtagggttgaagcagtctgggtctttgaattgagtggggtcccggtgtgcagtcacaagcaggggaatcacanaagtgccctgggg

SEQ ID NO: 710 - DNA, 507 bp, Homo sapiens
  Genbank Accession No. AI821005
  misc_feature (1)..(507): n = a or c or g or t
cgaggagatattcagcagagcccatggcctctgctggacagacagtgggaaggggaagctctgtgggggccctaaaagaatttcttgttaaccccccgaggttggcccttcctctccactggccatgatccacctgaagggaacttgagcatttaattcaacagaccagcatatacttcctcctgtggcctgatgagcaagtggagtgagcccaggcctgcagagtgacacaacagtaggtagacagttgcagaaggaaatagctgacccagaaggactctgggccagggccacccagcatgggaactggtttacacatgctatggaaactctgttttgatcacatgggaaacttcaggagctgatttttccctgccttgctcaatcctctnttgaaccctatcttaatgataacatggtagcgggagagggcagctctttcagaaggcaaaccccaggaaggcagacatttctgctntgtctgtgttattcactgccctattccaa

SEQ ID NO: 711 - DNA, 425 bp, Homo sapiens
  Genbank Accession No. AI821432
gcgtcgacatttcaacaaactatgtgacaggcaaacatgaactcatttctttctttcttttttttttttttttacctttcaactccttttatttatttacctatttattttccttaagcaagtaaatctccctatggattgttaagggccctgtgcatatttgcatgtagccaaagattcagtctcttgcaggaactctggttgtcaactggtgatcttgcctttgtcttttctcatagttctgcctgtggcgcctgtcactagcagtcaaataaggacaatttttaccatcctctcctgctgctctaattttttttagtgccggtacatgaatttgttattctttataattccctttgaagttggaaatccaaggggaatctaaaaccgaccagatgtttctgctgctggaaaggaaagagagt

SEQ ID NO: 712 - DNA, 500 bp, Homo sapiens
  Genbank Accession No. AI821472
gggacaagaaacatttaattaggggtctggggaatcagcaaggccccagacccatcatgcagcctcatgtacagtgggcattgggcccgcccctgggatattgctgggggggggggcctcatggcagcaaacagggcagtgtggcttgagaccccgctttgtgggggagaagtggggcaggggcctttgggtatgagggtctgtgtttctcccactgcatgggagggtgtaactgtgcccaggatgggggtggcatgggctggcacaatcaagggcataagaggaggatctgagcttgggggagggaggttggcaccgagaaaagcagctgtattaagagaggggtcctctctgtgtatgcccaccccaccccatttcctggtggccaaaacagaacattccaccttccttttctgtcttccaccccctctttttcccagggctctgtgtccagaacaagggagcagataaagccagcaaaggggctcctgcagcacctg

SEQ ID NO: 713 - DNA, 538 bp, Homo sapiens
  Genbank Accession No. AI823572
  misc_feature (1)..(538): n = a or c or g or t
tttttttttctgttgcagnggaactttattcatccgtgcacacctgggtccctcccggcccccacctaccctggccctgcctactcagggcttccaagattgggtgtcggggtggctttgcttatcctccagatgccttcttcccaggatgtgatccgtgccctccaggatctaagggatgaggactaaaggggtctgttcctcctccaggcagctggcatggaaccgtccgtctcaacggctgcttggtggtggcggtgtggatgggtgtggctctctgtttgctggggggtattctgccaggatgtataggaagccacccagggctgccactgctgtggctgtgttgtgggaggagcagccatctggaaattgtttttctcgcctcttcactctcctcgaaaaatgctgctgatattgaatagctttagatgattcttcatcttcagcatcaggctccccgaagcatccttcctgctgtttctgccagctgagaatggcctccagccaccggagcttgtagaagtcggagaagccg

SEQ ID NO: 714 - DNA, 611 bp, Homo sapiens
  Genbank Accession No. AI823649
  misc_feature (1)..(611): n = a or c or g or t
ttttttatgggtttccttaaatgtttttatggttaaaatctgtacaaacagatatatttatataagttacatattttaagaaaaatcagtcatttttcatatataattgcaaagaattaagatcatttaactttagcactataagcaagcattaaattaaatgcactcagatttttggcacattatatggcattccttataccacatatttataagatctaaaggattataaacatattacacataataattaagtccaatataaattgtgttcaggttataaaatgccctatttaagttgtgctcttggtgagggtgaacagaaaagaaaaggcttcttctttagcccttaagcctatgacacaatttccatgctggtaattcctttcatcttctgaagaatctctattttattataacattattggctttcagcttggaatttctctacgcagattgtctattgacagtgccaaggaaacatctcactgtccacagaatagcagcctccacccagttgaaagctgcacattgtttccactntaccattggtacttccctctgatggcatccagcacacgaccattagcctgagtgatgcccaactgagc

SEQ ID NO: 715 - DNA, 564 bp, Homo sapiens
  Genbank Accession No. AI823992
tttttttttttacacttgggttttaggtatttatttacaaagttcttactaatacaattgcttttaaaatgtagcaaagagtcatttactactctcagaagtggcacatacatggcatagaaaacaatctatagtcagttaactattaaaacagaaacttgaaatttaagtgacaaacatttgtagcactccctaaagaaataggaaataaaaatgcatttatccatatgaacttgattattctgaattactgactataaaaaggctattgtgaaagatatcacactttgaaacagcaaatgaattttcaattttacatttaattataagaccacaataaaaagttgaacatgcgcatatctatgcatttcacagaagattagtaaaactgatggcaacttcagaattatttcatgaagggtacaaacagtctttaccacaattttcccatggtcttatccttcaaaataaaattccacacactatcaaactaaatcaagatttgctagtggataaaattaccataaatataccgtactctctctgaaacagctacaaacatct

SEQ ID NO: 716 - DNA, 603 bp, Homo sapiens
  Genbank Accession No. AI824037
aatactgctggcttttattttaaaaggtattgagatacaaaaattgtatcttatcttgtaaaaaatatttatttatcaatctttctggcactattaaaaatgtcccattttcactagacagaatcacaaaggtatacccactcaatcataacaatttgttttctatggagcaatattcacagatcctgtgaataaataggtgacaaactccaggtggccccctgtagggtctgttatatttaaagttttctggaacacacataattatgaggtttggctctcctacagtcttttgtttgccatttcccttgtctttgaaccaaaacacagctctttccaagcttggagcgtggagagggccctcttctcccattggtgaaggcaacaggttcaccaccgatccactcccagtggccagcatgcacttgacttcgttgggaacctcactccacaggtctttgactgccatttccttcccaacgaagtcaagtatgttcacaatggttgtccaattcttgatgaagacacagtgaagctcagactttacagatttactgaaagagataccttcatagaaacttttatcctgtggtctatctcctg

SEQ ID NO: 717 - DNA, 385 bp, Homo sapiens
  Genbank Accession No. AI825341
tttttttttttttttttttcttttctttttctgtaaactggaagcaaagacttgttttgatggtggaaaacttacccctaaggagtaaagaggcgggatcttaactttgggacccggctgcaactagggtgggggtttgcttagaggtacccaggcgctctgcgcctgcctgcgaactttccttgttactcctggccgtttggggtgctggactgggaagctcctgggtgagcgggcggacggcggctcccgcccggggctggtcccgggcttcgcagtcaggggccgatggggagagtcgtccccgcccgacctctgcgcgctctggactcagccgccccggccctcctgggtgttcccgtcgcggccccgactcggtgcccgc

SEQ ID NO: 718 - DNA, 445 bp, Homo sapiens
  Genbank Accession No. AI825713
  misc_feature (1)..(445): n = a or c or g or t
anggagagacaagggactctttgtgtttctcctggactaaagcaatcctcccacattggctttccaaagtgctgaggttacaggcacaagcccctgcgcccgaccacaagtaggtgttttaaaccagtgtttttttttaacaaggcacaaacattcgacttaagggtgacagcatagtactttaccaggaataaagttatgttttacacatatacacgtggaaaaattaaaaccctatgaagttggtattgtcttatattaagtaatgaggaaactgaggcataaagtagctaaggattttgttcaaagagcaagtgatggcataataagaacttgaacccaggtctacccagcatcagagcccatattcctaatccccacactggggctgcaggaggaaattaatggaaggattcccacaaaacaagacaaatcttttaccata

SEQ ID NO: 719 - DNA, 707 bp, Homo sapiens
  Genbank Accession No. AI825806
  misc_feature (1)..(707): n = a or c or g or t
ttcggataaaacttgaatcttcttttcccacttagatttggtttcaaaaccagataggacacctgaggctgagctggctgcagtgtggacgctcctcgggaggacagcagctccaaggacacgagaagcctcagccctgggccccaggtgagtccccagcagtgccagtgcacttcctcagtgcatctctttgaagtagaaacgtctctttaggctgtttccaaatttgttgcagagaatgctgatgtctctttcacagcacgccagtgttggagatgtgaccaccatccccacctcatgggaagggagtttggaagaagggaaggccattgatcttccagtcctggtgtggcaggcagtgcagagtcctcttcttccagcactgcaagggtttaatccaaggtccaggatcagtgcatgaacacctcaggggccttgttccttagtcagcatttcattattgatgaatacaacttcccacanatgtttagattgattttcttggctcctctctttcaggtgatcagctgtccagacttctggaaagctctggcttgggaattcttcctccagtctccatggttcttcntcttngtcccagcctgaagatcacctctgtttgtgagcacaataccccactgagacaggggttgctgtagtctcagcatcacatctctatacagagccctctgactagggtcccagtg

SEQ ID NO: 720 - DNA, 567 bp, Homo sapiens
  Genbank Accession No. AI825877
tccagggagttttatttcctcagcagctgtttctcccatgcctgggcttgtgctaatgtggggcctgggcggagcctggggtcgggtgggcatctccctcagactgggcaacctcaggtgccccagccgagttcctgcagcccgctttggccccaggccgtcctggagagggtctggctgttttctttgcctgctggtgacgtgatagcagcccctgcctcatggcctgcatgtgggccggctgggctgtgctgaggcaggttctagaacagtgatctgatagcatccaaggcagaccatgtgggtgagacttgggccgggggaggcctcatcctcttctctccccggcctgcactcctctcagttgatgctgggccactcagtgcaagaggcactgctgtctatcaggaagacagtggtgtatagcagctcctgggcctgtggcagctcaaaccagatggtctgggggttgtcagctgagccatagttgacttccaggccagggggccccttctcctccagagggcttagcaggtggagccgctgcaggctcttcagggcaatgcg

SEQ ID NO: 721 - DNA, 501 bp, Homo sapiens
  Genbank Accession No. AI825936
ttttttttaatttttcagttgtttattggaaactatagattttttttaaactcactaattattttgccatacaagagcaaaattcaagtaatacaaatatttaacattttggtataaaattaacaatatggaaaaaagatgcaaaccaaccaaaaggtaaaaaaattttaacaataacactgtgtataaccatcttctattcaagtgaccatccaagctgatagtttattttccctttgttgacattttttaaaaagatagccctacactggagcaccaaaaagttttttccttcttttttaaaaggttggaacccttttatttacagatactcttctcagtactttaagtaagtgtgatgaaggaatcatctagcaacttccttcttagaaaaaaaggaagtgccttcatatttccttgaaatttaaacttgttccattctattctaagcaaaaattaaaaggacacagttcagaagagctctttcagcaaataaataat

SEQ ID NO: 722 - DNA, 570 bp, Homo sapiens
  Genbank Accession No. AI826437
ttccatggggagaatgaagccattttatttaggggaatgttaaaacaaagccatatacaatctgtaacaaatacaatacaattgtttgttccctagtcctgaataattacagtatatacaaaatctgtaaggcactggttcccccaaaagaacaaatgagtcttcttgtgaaacagacaacgaaacccctatattgccaacttttctccaaaaaatatggcattgtttttttgttttgttttacaagaggaatcacaattgctaaattaagtcacttctgatgccatttctttcatttccactgctatgtgtctgggttttctaaggcaatgtaactactgaacatgttcaagtttaaaaaactatacttctctcagtgccgttccacccacaaacaaagaagaatcagatcagaccaacaacataaaacttctaatgaatatgtatgactgtaggaacatgaaattcagtcattattaagtacttgctatacttgactacacaccaattgaaatgtgtcaaagaattccctgtaaataaaatctcagcatgttttctaagaagctttct

SEQ ID NO: 723 - DNA, 748 bp, Homo sapiens
  Genbank Accession No. AI827230
  misc_feature (1)..(748): n = a or c or g or t
ttttttttttttaggttaaattacttcgaaactttaattacagatacttttccacgcaacatttctgaaatgaaagctttgattctcccctttttttgcataaaggctgggaaggtggtttggccagaccgtacatctttttgtatatacatatctacacctgtgtctcttctttattaataaaaggggttcttgatcacagtcccaaaccaactctgcattggattccagcatataaaactcagagagtaaaacaatttcaaaggaagacaggctgcaaccacaggaaaatggcaggaaaagttgtagcttgatagttgtttcttctaagtttaactcagaaatataataataattaagagaaaaaaataagaggccctagctttcatccctgctaccaaacacgctcgtccagaactctaggctgtcttaaagtgcaattactgttgtgaagttgctcaggccanggatcanggctggacggagttcaaagcagaaacttcaaacactccttgctgttcatgactcagggggctggnagggaaggagaggagaaaaagaatggacagttctctggcattcaagtgcatcaaaaagaataaatgtctttttcttttggttaaagcacatctgtcaatagtaagggaattctggtttggaaaaaatgaactttcttaaacttttatctgcgatgtcccatgcagaaagggaacaagcaggcagtgcaccagcaccagggacccagttg

SEQ ID NO: 724 - DNA, 492 bp, Homo sapiens
  Genbank Accession No. AI827248
ttttgagtgtggaaacaatgggattgagcttttatcttagggaaaacttttacaagaaacagttcactgagagggttccagaaagttattgtagacctggaaactttacaactgttcctcatgtccagcaaaagcaataacatctttcatctttaaagctttaattctttaagcaatctactttaatcacttcaaggcggtgatatcattagatgttacaaaattaaagagctgggctacataatttttggaactctgcaccaaagaagccattcacaatggaaactgtggagtttcggtagatggcactcttttctctgagtgacaactcaaggtccagcatgtgaccgtagatgtagaacaggggctttcctgaggagctgtcctttagcctcaactataatcctggtaaactcacagccaatcattcttgatttttaaaaagaagcctgtagataagacatcaatccaggaatctgaagtagttaagag

SEQ ID NO: 725 - DNA, 601 bp, Homo sapiens
  Genbank Accession No. AI828075
ttaaagcctttattggtatgaaaggttgaatgctctaggtttgagcactgctttctcggcttgctcttctggtgcagtataggcacacctagagggccacgtcagtctttgcgatcaccaaatctggttctgagaaataggcactggcaatttacacatgccttgctgtgtaatctcactatatttgctcaggcaaagtgggagaagcagccttagggtttcattctagagatgccggctttcccacctgatcggcttagagttcacgattgactgttttgggcttcatttcaccctctacataacaagcgggtggactagatgccttagcaagggtccgtgttgtgtggtgtctccagccacgcactcagctcaatcttagcacagttaaaaaatgcctttctagcaagttatctgcccagtgcctgaaaagtatcatttcttgtgttcaataaaaagcctcctaatttaatcaaggacctatgagataactgtcttttagttgtggcattgcaaggatacaaatgcagagatattttaaagtgatccttctgtaagagtgaaccaacgatatgatctgaaagcaacttcacaggtaatt

SEQ ID NO: 726 - DNA, 465 bp, Homo sapiens
  Genbank Accession No. AI828396
agcggccgctcgcgatctagaactatgcctccttcccaccccacagttgccccccaatggggcctcggctggctcacaggatgagggttcaagaagaaggctgtccctggaggtaagagggcttatgaaccatgttccaaacctttgcgttgcttttctttccatcgtgtctatttcataacatccctgtgaggctggatgtgggaacttcagcactgccgtactcttgggaaatttgtccaaggccacccggctgagcagcggttgaaccaggacaccatcaggcatgcgtttcttgtctccaccacaccctcaacccacttcccaacgcgccttgcgacaggggctgcggtattgcatccacatgactgataaactagtaaacacacatgaattcattttaaaagtgtattcaatcagttaggtaaactaaaaaccttaagtcttcgttcgatttggaacgca

SEQ ID NO: 727 - DNA, 601 bp, Homo sapiens
  Genbank Accession No. AI828404
  misc_feature (1)..(601): n = a or c or g or t
ttttttttttttttttttttttccagggcagtggtgggtgctttatttccatgctgggtgcctgggaagtatgtaaacggggtacgtgccaagcatcctcgtgcgaccccaaaaacccggggagcgggggcttgccggccgtcncactcatttacccggggacagggaaaggctcttctgggttttatggttgtgcaaaccctcatgcatcacggagcatgagaaaacgttcccctgctgccacctgcttttgtccacggtgagcttgctataaaggaaaaaggagccgtcggagtccancacgggaggcgtggtcttgtagttgttctccggctgcccattgctctcccactccacggggatgtcgctgggataaaaacctttgaccaggcaggtcaggctgacctggttcttggtcatctcctcccgggatgggggcagggtgtacaccttgtggttcttcgggcttccctatggcttttgagatggttttcttaatgggggctggagggctttgttggaaaacttggacttttacttttttgcatttcaccaatctggtgcaggacgggtaggacgctgacgacacggtgcatctgtt

SEQ ID NO: 728 - DNA, 456 bp, Homo sapiens
  Genbank Accession No. AI829169
ttttgagacacagtctcactctattgcccaggttggagtgcagtggtgcagcttcctgggcttaagtgatcctcccacctcagcctcccacgtagctgggactacaggcatgcaccaccacactcctggtcaggagttcgagaccagcctggccaacatggtgaaaccccatctctactaaaaatccaaaaaaatcagctgggtgtggtgacgcacacctgcagtcccagctactaaggaggctgaggcaggagaatcgcctgtacccgggaggttgaggttacagtgagccaagattacgccactgcactccagcatgggctacagagggagacctcatgccacacgcacaaataataataataaaaataaataaaataaaatgacagttagttgtctctaggcaaatatatagacatttaaaaactaagttgaataactccacatacagaatat

SEQ ID NO: 729 - DNA, 480 bp, Homo sapiens
  Genbank Accession No. AI829385
ttgatataattatgtgatgcaaatattaacttcatccctttccttgtaaattcagcttttctcaccagagctcaggggcagtcatgacaataaaaataacaatagtaattacaagaaatgtgctctgagtacagagaaaccacaaggcccatctcaacacacaaatacaaaaacaactcgcatttacggggcgtttccaggagttaatagcatacagtaccatgggtagggtgtggttggcagaagctgtccacttttttctaagtgccaggtgtccgttgctgaggatcttgtgctccctcctcccttcgttttctagagtaacttcccagaggaccctgcctggagcctgccaagccagagtccagcgtaaaggcccggagggctgtttgtgtctttctggcctccctagggtagagggcagagctggctgcagctctgataccctttcctggagctctgcactctctcctcccctct

SEQ ID NO: 730 - DNA, 491 bp, Homo sapiens
  Genbank Accession No. AI829520
  misc_feature (1)..(491): n = a or c or g or t
ttcctctattttctcagccactactcctaggcaacctatacatcctgatgggggtggggatatgcatgctggaaacttcctatgacaatttttatttgactggtgttcttgttagatctgttagtaatgagaaaagatgggactggaacttaaaaagggtaaaaaatttacaactttaggcaatgcacaaccaaatgagttttatattttataaattatgctaccgagaaatgtaatatatgagtcagagagaaacttgaatggtgaattcctagaaaaatcaaacaaattctcaagcaaattaagttctgactgctgaagacctgtttgatctcagaaaatgcagagaactgtgtctatgatttagactggtaatcacttgggatatgtggcacttcctgattntatgagagaaactgatggtctgaacaatctaaattattatgggcccaaatatttaggttctgaacagttgcgaaaataaactaagt

SEQ ID NO: 731 - DNA, 597 bp, Homo sapiens
  Genbank Accession No. AI831452
  misc_feature (1)..(597): n = a or c or g or t
ttcacattctcaatatgctttattcaacagaacaaaagaaggcaaagagagcagagaaagcagtgcaggaatgcagactgcatcagaaggtacatcacttgccattcagggacactgcaagagaagatcaggacaactgacttgtcagatgagaactcctgagtgtagctataatgggcaggatggttagcaattaaagagaggactcctcatctgcagctggacctagactgagtttcagttcttatggggatataggtcattttcttctcagaattatggcagactcagatacctgtaataatacgggaactaaaaaggacattcgcatgtctgagtgctgataactgttgacttgatggtaagcaacaggagctcagtggaacaggtattgatgagaagaaaagtgagggcatcccagctctacccgggagggcaggggagactggaggccangggaggacaagcaacctgaggagagggctctgctgccaaagaggggcctgagagctgtgggactgagagctggcggcagcacttcagtgcttgtagctcttcctgctggagggagaaggtggggtgtnctngnatgggtgg

SEQ ID NO: 732 - DNA, 414 bp, Homo sapiens
  Genbank Accession No. AI832477
tttttttttttttctgccccaaaatattttttattcttgcattacatttgggtttccaattgggaataaaaaatgcttaaaaaggggttacaaaacagcgggaactggacaggaggagcagctggccctgagggtccgtcacttctccacttaaacggggggaagggggcctggcgtctagggggggtcagtcaggcttctcactctcaggatctggggggggcccggacagggtcggggcggctccgggaatgacccggggggacaaagggccgggcgctgggggcaaacgtggcatccccactcctgctcgaggtgcggtcatagcccgcgcctcgccaggggcagcccaccctgcctgggcctccatgttttgcagcttctgggtctgcttcagctattactagggaattc

SEQ ID NO: 733 - DNA, 588 bp, Homo sapiens
  Genbank Accession No. AI833102
tttgacagtttctccactttattagcctggagctcctccctgccagccccaggggctggtcgctggtccctgggcacagtgagcagggctgaggtcagacgggttcggcccttggccatggcagcttggttgggacagccgggccaagggaaaaaaaggtgcaaaagtccaaatgctggcacttcaggtgtggccggcacccagccaggcgcagtgggtgggcagggcgccatgcttctctcctggcgacaggtcggccgtgtagcagcgccccctcccagcagccactaggaacagctggtgattctcgccaggaactgctgcgcccaccactcgtctaggtcaatgggcacaaagttctgcagccggggaattggggtcctcttcacgtactgcacaggccttggcccgccctcaccggctgggccaccatcccagctgtgttgcacctgctgccaggcttcgacacaaagcggacatattctagtgaattcattgtaatattactaggattcactaggaatattacttgtgaatcctgggctcaagggcaaatccctataaaggagcgattaaaattgaataagt

SEQ ID NO: 734 - DNA, 533 bp, Homo sapiens
  Genbank Accession No. AI857788
tttttacatcaaaaaccatactttattttatgtatagcaatacaatttacatattaaataacactataatagaatgatttgatatagtttaaacagaagaaaaagggaaaaatttcaggttacaaaacccctccccctgaacaaatttaaaaaaaaaaaaaaagcacactttttccaaatgggtcaatgtgacgaatgttttcagtgactaattatgtctaattcctattgcacaaatggtcaatggaattaaaaagaaaacccaactttcacaatcactgcctcaaagaaataacacatgttggattcttttggaatgtaaagatggtttttgctacttcaatacacagaaagttgaattcacatatccaccacaaaaaggaaaaaaaactatgacggagttgaaactagaaaaaaattagctttatatgaaaatataaaattctatgattatataccatagatacaaagttcccagaagatgcttacccaagcaacaaaatatttacagttttaatgatttttagctattt

SEQ ID NO: 735 - DNA, 537 bp, Homo sapiens
  Genbank Accession No. AI857856
tttttttttaatttcatagcaacatgtttatttaagccctagctaagttttcatttacaagcaaatattttcaggggaaaaaatcacataagacaatattttcaaatgttataccatctacataaaaattaaacttgcagaatttacaaattaatattctgagcagacagaaatattatacatccttttgcaaaatccagtcaacaacttttaaaaattcatacaggcacaacacaagatagtctctctatacaatctacctatttacatagcttttcccaccacagatgataatagctctcatcatagctaccaaggttcgcaaacatagtatatttaaaatatatttagcagcatataaaaaattagataaaagggaaggaaatactactattaaataaaaacaaaattaaatggtcataatagaaacaactccataggaaaatagatcaaaatatatttctgttaggacatcaacaatgtttcccatcacagaatatatgcacagcactggaaaaaaaaaaaaaaattaacagc

SEQ ID NO: 736 - DNA, 460 bp, Homo sapiens
  Genbank Accession No. AI858012
attaaatgagcattttattccattccaaaaggaagcaaaacaaaccaccctggttctgaacttcgaaggacctaaagcttccttcctttgatttggtaaaaagctgagtgagctctgcccctcaggagctagtgaaataagggcagccccacctcaaagcctcaccaccagctgcgaactctttccatagagtcctgagtgtggacattgcaagcagctctcaccatgcacagtcctgttttgcaaggtaaatttccactagtagggaggagggagaaaaacagagttgtcttaaaaaaaaaaaaaattgaaaggagttcccagagcttggcctatccccagtaagctgtgcaaagaggccccaaacttcctgatccccagctgcaagcccaggcctgtttcctggcctgcagcaagcttagcacccctgggacagggcagggctttgggccagctgaca

SEQ ID NO: 737 - DNA, 617 bp, Homo sapiens
  Genbank Accession No. AI858626
tttttttttttttcacggctgatatttattatgtttattcataatttgattgcttgtttgtgcagtgcttagtggacagcacatctcagggagcctcccaaagcctggggtggaatacggtcatggaccatacaggaagcttcaccaaactgggaggctgagggccttcccccagcctttctgctgatagggaaggcagagaaactgaaagcatcaccatttcttcagttagtgctttctcctttctgtaattcctgttagtcatcatcatcatcatcctctggaacaaaaatgtcatgttcctcaagtagagcagcaaagttcttgctaatgagtgtcccgacatagagaaaggggatcacaatggagaacacacggagaaggccgaaggacattttcaccggtttgggcaaaatggcgccgctgcgggtaacgatgactgacctcgacggtaccaggctccggcctgagccgctccatgcggcggagacatcgccatctttcctcaagctaggcccgctccggagagccccggacctgacgggtgccaatactagccagcgagccggttcggacgccatgcccccagctccgcccctcacccggcacccgcaccc

SEQ ID NO: 738 - DNA, 546 bp, Homo sapiens
  Genbank Accession No. AI859144
aaattttctctcctcgtggtgactgtcatgtgattgtctcagtttctggaccaaacaaacacactaataattttaaatctgaaacagtgattgtgcctttcggctcatgtatgtacagggtgatcagaagtggtacctgttagcaaaagtgtcacgatgctgcacctctaccgaaactgatacccacgaactacggaatctaaacagactacaccctggtacctgcgtattactgtccacaatggaatctccaaagacaaaagagtatgaaatttatctgtagtgattatagccaccattttgaattaaattttacactctgcgctcaaataaattagctcaggccagacttagttgggacctgagagttaagtgctggatggtattatttcactttgatttttgataggaatttcttttattccctcatgtttttttttctttaaaaggtatttccagtgctcactcctcctcttttatcccccctccccaggcgctacacacaaatcacccccaaagtcgtgttttaaatgcacctgtatttgc

SEQ ID NO: 739 - DNA, 689 bp, Homo sapiens
  Genbank Accession No. AI859620
  misc_feature (1)..(689): n = a or c or g or t
ccgaaaatactttaatgcgaggtcctcgtgtgggtcgtgttttggagagataactggccttggactggagggtggctgccttcttcctttgccaggtcatgcgaggggctgctggccaccccatgcacatgcccctgcccctccatgtcagatgcgtgcccctcggggctggccgtgtccgatgcaggccccttccggctgttgatcttgatggcggcgcgcagcgccgacttgaccgccgtctccacccagccgtgcgggtaggcggtgtgctcgccggcaaagtagatgcggccataagggaccgtccagtcatccttttcggtttgccagagcgccggcggctgtaccacaaagccaccctggctgtgctggtcctccgcccaacgcttgacgacgccggtgccgtcccagagctggcgcacgacaggcccgtgcaatgccgccacgtcgtcgagcgccaagcgcaacgcctcttcccggctcaagccggcgaacgcttgccgcgcgtncgaccacgtgtacgaggccagcagcagcgcgccctcgcgcggcggcgggtagaaaatcatgcgcgacgggcgatcggtgttgagtggccgncttttcatgtgctctcgcgccagaagggcctgcggaagcttangaacaacctttgtggcccgcacgtagtgcagccttcgcagcgc

SEQ ID NO: 740 - DNA, 526 bp, Homo sapiens
  Genbank Accession No. AI860012
  misc_feature (1)..(526): n = a or c or g or t
agcggccgccctggttttttttttttatatgtttaaattttaatactcaagaaaacaaacctaagttaaaattggatacaaatactgctggcataagaaaatatacacaaatttggattcaaatggggttattatgtgaacctggatgtaagactacatcctaacaacctgttgttgaagccttttaataaagtaacagattttaaatcagatagatataaaaagactgaagaaaaacagtaacttttccttaagttctcttatccataaagaatgacaaactccatatggacagtaaagttagaggtcatccaatttaccaaggcattttgaacacataaaccttaaatacctactttaagcccaaacaaggtaaaaataatcggcatttcattgtgctccgaagtttaattntacatatcatgttaacaaattatagaaaataaaataaaagcattttccattnttttgaaagtacacatcattacttctcccaggtacttcagtaatttaagcttaatactcg

SEQ ID NO: 741 - DNA, 485 bp, Homo sapiens
  Genbank Accession No. AI860484
tttttttttagagtagttttagcaaaattgaatggaaggtacggagattcccatgtacccctgtctcctccatcatcaacattctgcaccagagcagtgcatttattacaactgatgaacctatttgatgcatcattgtcactcagagtccatagtttacagtagggttcactcttggtgttgtacattctgtggatttggacgaatgtatagtgacacatattccaccattattgtatcatacagaacagtttcacagccctaaaagtggggagattggcctcagttcgcctacctaagagactaaatgacttacccatatatggttgcctccatatgaagagcagtgagaaccgccggccgctggtgtgtctcaaatgcctgtgaacagtgaaatcctcacttggatggtggcacctgttagacacaattggctttaaatccaggatatttatttttaaaccagcagctggggaaatgtgaca

SEQ ID NO: 742 - DNA, 833 bp, Homo sapiens
  Genbank Accession No. AI860651
  misc_feature (1)..(833): n = a or c or g or t
ttgacgtgttacctgctatttttattccccatttgccatcttctgattgggggttgatgttttacagatttttttttcaaaggctttatttcagtttctgaggttaggatgcccctgtgcccctcgctccacacctgggcaggtctaaacttccttccaggatggcctccacacacagcctcccacctggggtcacctggcttcctgggggacccgcaagggaggggcagggagcancantccgggtgcggggatcgggggacctcggcgggggcatccacaggggctgcaagacctctggtcagcatggcgtgggtggggagagcgtttctccctggggtcctgagccagtgactcctgttaggacctttgtcccacctccgcctggtggaccggcagggacctggtctagccagtcctgcagcctccattcccccacctgcccctccccgctctgtggtgtggctgcccaggagagaaggggcccagggaaaggaggtctccggcaaggggtggggagtacaggccaggggcagcagggcttgaccggagcttgctcacagctgccaagcacttgtcgtcattgccacgaacttcttattcgtattcatggaaggactcaccgcggtgtagtagtacctgaaattccacagtgtgacctgcccgtccctctcaaaggagtcgaatgtggccagaaagcgcgcagcagctggtccttagtacattccgactgggancttgggtgggacgggcccgttacacncggggaatgatcccatcacaagacctgcngagtgcgtcagctggcaatggcactgaatcaaacctccnnc

SEQ ID NO: 743 - DNA, 489 bp, Homo sapiens
  Genbank Accession No. AI863166
cctgtttttttttttttgtagagacggagtttcaccacgttgcccagactggtctcaaactcctgggctcaagcaatctgcccacctcagcctcccaaagtgctgggattacaggcgcgagccactgcacctggccttttaaaaagaaatattttaaaataaaataataagctgagagcagagggatgaggagacactgccagaccaaagggaggaaagaaagttctagacaggtggctctggggtgggtaggggctgggcatttgaggaatttaagaaggccctcgtggccaaagcttggtgagcagacagtcagcggtgagtatgaggtcagacaggctggcaaggccagaccacataggcaccagcagtcaggaacaggacactggttttcatcctaagagcagtgggcacccactcgaggggctggagccaagggtcaggaattgaaagatgagctttgaaaagagcacgctggcaggggcccct

SEQ ID NO: 744 - DNA, 432 bp, Homo sapiens
  Genbank Accession No. AI863167
ccctcctccccacacctcaatccaccaaaccatccataatgcacccagataggcccacccccaaaagcctggacaccttgagcacacagttatgaccaggacagactcatctctataggcaaatagctgctggcaaactggcattacctggtttgtggggatgggggggcaagtgtgtggcctctcggcctggttagcaagaagcattcagggtaggcctaggttagtcgtgttagttcttccctgtgctgagcagagacttccagaagcaccagaaacggagccagatgaaaggaccccaacacctccccccgccaacctttgacagaatataggggcatcttcagcctggacacgcatgcatctcccctctcagaccctcagcacttcttccactcccatcaagagccccctcacggtccctctcacact

SEQ ID NO: 745 - DNA, 601 bp, Homo sapiens
  Genbank Accession No. AI863965
  misc_feature (1)..(601): n = a or c or g or t
tatacatctaatttgttaatactcaatgcacaatcaacatttctgatcaacagtataaaccatataaaagagaattctgcttttcatttgtacaaatactgctttcatcattgcaaaactttcaaggttaaaacgtaccatatgttgaagctataaagctattgcttgaatgtttctaaaacgaagttattgctgtctgttgttaatcggttacattgtcacctctaataccagtcatcaaatccataggatctcttaatttccaagagattgtattgtacagcaagattatttttgtggccaaatcaggtcataggattcctttttttttaaagataagtaaatgcatccagaaatgtatgcacagattttaagttttccccaatagttttatctgctaggtgaatagggttggagcttccttagtggcttctgctggggaaattcagaataggaccagactttgcagcctncagaggacacactggcaggggtaggtggcagaanagacattgggaaggtaaaacacacctgcctgctaaccattagtttttatcccccaagtataaatttgtggagggaaatgtataaccaaaatggt

SEQ ID NO: 746 - DNA, 511 bp, Homo sapiens
  Genbank Accession No. AI864016
  misc_feature (1)..(511): n = a or c or g or t
acattcaagataaaagatttattcacaccacaaatgttatattctctttttaagtgggtaaaagtattttgtttgcttctacataaatttctattcatgagagaataacaaatattaaaatacagtgatagtttgcatttcttctatagacataaccctgaagcttttagtttacagggagtttccatgaagccacaaactaaactaattatcaaacacattagttatttccagactcaaatagatacacattcaaccaataaactgagaaagaagncatttcatgttctctttcattttgctataaagcattttttcttttgactaaatgcaaagtgagaaattgtattttttctccttttaattgacctcagaagatgcactatctaattcatgagaataccaaatttcnnggtgtntatcttcttcttactttttggggtctacaaccacatatcttctgggctgtgaaatcatgggctgttggaattacgctgactttgggaaagtt

SEQ ID NO: 747 - DNA, 523 bp, Homo sapiens
  Genbank Accession No. AI864898
gcggccgcgcctgcccgctcgcacccctctcccgcgcccggttctccctcgcagcacctcgaagtgcgcccctcgccctcctgctcgcgccccgccgccatggctgcctcccccgcgcggcctgctgtcctggccctgaccgggctggcgctgctcctgctcctgtgctggggcccaggtggcataagtggaaataaactcaagctgatgcttcaaaaacgagaagcacctgttccaactaagactaaagtggccgttgatgagaataaagccaaagaattccttggcagcctgaagcgccagaagcggcagctgtgggaccggactcggcccgaggtgaacaggtggtaccaagcagtttctctacatgggctttgacgaagcgaaatttgaagatgacatcacctattggcttacaggagatcgaaatggacatgaatactattggcgaatactcccaacgtcactaagaatgaaagactctgcaatttggtccccggaaaccctaccggtttaggcatgg

SEQ ID NO: 748 - DNA, 289 bp, Homo sapiens
  Genbank Accession No. AI868289
  misc_feature (1)..(289): n = a or c or g or t
tttttgaggcaaggaaagtgacttttattcagagagccagcaaaccaagaaaatggaagagtagtgtcctgaagaaccatttttaagtcaatacaaatttcaggctccttttacgtgagaggaagggggaagaggggggagnntgaggtcaagaagtggccagtgatcacatctgggtggtggcaagggtccaaggaggtggtgaaactttgtccttggtcaggtcacagtgctcttataaatctttaacataacattattacttgtatacatcctccttatctcctca

SEQ ID NO: 749 - DNA, 752 bp, Homo sapiens
  Genbank Accession No. AI869951
  misc_feature (1)..(752): n = a or c or g or t
tggcaataaaataaggtagattcagcacaatacctaataactaaaaaatctgtttttaattgggtggggcagacagcaagtgtgtcatcctggaagatactatttgggattttatgtaggtacataagagaaaaaagtgaacaaaagcaaggggctaccaggacgccgcagtatgcttaacatgtattttctaagtttgtattatgcctttatcttggtacttttatcttctgttctcacttgatctttttgaaatgtattttaaatcctaataaaaatatataaagtctggaattaataaaggattaaatgaaacttttgtatatctcactgaaattctcagaaaaaaggggggtgtggggagggggaatngcctgnggtnnnnantgaaaattgtaaccagnntcttactaaggaatatggcaactgcataatcaaatgtcagtggttaccaatcttatgagtcacctgatgtgtggtcattagatggctatccttgcctctcgcccccagtgttgagaatagtggaactatgtgggggtttagaaatatgcaatatatatttgtatatatttgtgtgtctcgacagcttgcaggttaaagtagatcaaactggtgagggaaccctattggttnaggtatgcagtctcaaagacaagggcctttaaacgtgacttaattnttcgtgcaattttgccaggaaaatggtgaagtcgccaagcatnagggtgggaaatgnttgtcagacttga

SEQ ID NO: 750 - DNA, 486 bp, Homo sapiens
  Genbank Accession No. AI871044
ttttttttttgtcatttcatttagtttattagacaaaaatatatgatttagacaagttcgctgacgcgctatttacaatctgaaaccactctatatacagaaaaggggggaaagagacacaagcacgtgggggcatttaccgaacccgataatcgcagccactggagccgccggcagaggcctggccacctggacgcgagctcgggaccgaagaagcccctttctgcagaaagcgacggatgcgagtccttgacgtcgttgtcatatttgtcctttacaccagtctgaaatatttgtcttaattcctcccacattccctccctccccaactcctcccccctcccccccgcaaaagtaaaagaagacccttaatcaggcggacgggagggctgctaggatccgcggcgttccctcctgcggggccagagagttgtcgcgtaccggctggaagggcgactttaactgctgtgccggcgaatctggcct

SEQ ID NO: 751 - DNA, 414 bp, Homo sapiens
  Genbank Accession No. AI872267
ttttttttttttttttttaaagagaaaaagaactctatgtcctcatttcaaatgcagggagagtctctcggtttaaaccgtaagtgcccttcccaactcggcagacccgccccagtgaagagcattttcatgacttgggaacaggacactcaccttgccactaggcaggactgtactcactggctcggggggcgcccaggcaggagacaaagcattttcccatggcatatggatggcttccgtgtgctgcatgactgggcagtgtgagaaaaacgcaacccccagtgactgctgtagaggacaattcagccaaaaatcaaactgccaccgtcatctgctgagaccttgatttcccagggcctggtggtgctgaaatactcagaacatcctgaatgaatgaatgtccacttcctt

SEQ ID NO: 752 - DNA, 601 bp, Homo sapiens
  Genbank Accession No. AI879337
  misc_feature (1)..(601): n = a or c or g or t
atccttaattaaattaattttccccccccccccgggaaacgccgaggaacccggctgaggcggcagcagagcatcctggccagaacaagccaaggagccaagacgagagggacacacggacaaacaacagacagaagacgtactggccgctggactccgctgcctcccccatctccccgccatctgcgcccggaggatgagcccagccttcagggccatggatgtggagccccgcgccaaaggcgtccttctggagccctttgtccaccaggtcggggggcactcatgcgtgctccgcttcaatgagacaaccctgtgcaagcccctggtcccaagggaacatcagttctacgagaccctccctgctgagatgcgcaaattcactccccagtacaaaggacaaagccaaaggccccttgttagctggccatccctgccccattttttcccctggtcctttcccctgtggccacagggaagtgtggcctgaataccccaccccggctcctctgcacccagagctgggggccacctcagagtgtcatctctctctgagcacgcattcccctgcagcagtcgaggactgagcagnatgagtgat

SEQ ID NO: 753 - DNA, 506 bp, Homo sapiens
  Genbank Accession No. AI885164
agaaaaagtctacttttatttattggtaaacataagacaaccaagtctgagcatctggtgcagttcccagtgacggcacttgccctgcacacgctcttgaagcaccaggaaaaacacacaacacagtaagaaggcaaagtggctgggagtaaggtatctgcagattcaaactttgggattgaagtagctggtaaacagaaaggcaccgaatcagggtctggagagacccggctgctggggaggaatctggcctgcccaggcagacagggacagacatcctcatttctccaacagctcctggaagccgagtcaccccaagggcttggagagctgttagtctggctttggagcagtgaaggtagcacagtgctcagcaggaaggagtcaagactttgctgtcgagcacagggaggctggtgcctgaggctcagcgtgccaggatccacgcctcctcccaggctgcgcagtgagctggaatctctccctctcctgtgggagcagctctt

SEQ ID NO: 754 - DNA, 505 bp, Homo sapiens
  Genbank Accession No. AI885498
tccagttttgggttttctctttttaattaagatacaattcgcactctaattcaaagtctcggcattaacatatattttgttgatctggttgatgattttaaaattatttttcctttgtattctttacctacggctaaatttctaatcttcaaaatgcctacattcatttcatttaccttacattttatcttactcatttttaaagccttcaacattttttgagttttgaaataattctcaatttcttagtctcttaattcttaaatttaaaaaggttgtttcttaccttttaaaatttttaaaaataattatgtcaagtaatttttgaatatagtaacctgattctacatttctcatgggataaattctaaggtaaaaaaaattgcaaataaatcttaaactttatttagtaggtttattattagcagcagatgtctagccagggtagattacttttatcagaccaacctctcaccaacaactactagaagagctagagagggag

SEQ ID NO: 755 - DNA, 734 bp, Homo sapiens
  Genbank Accession No. AI885781
  misc_feature (1)..(734): n = a or c or g or t
tatagatcataaatacttttaatatcagataaatcattaagaaattgcattctgtacttgatgaccacacgggaaccttgctagagtcaagagaacttgtcactagtaattatgaagacacctttacggtgagcgttattaaaaccctactagaggttttgggtgggactcaagagcaaggggtggccacctgtggacgagggttccctgttgttaacagaacacgttgcccacctcgcaagtatgcagcccaatcagtccccagggtctcggttcccgttgcgcccttccccatggccactgcgctcattcatgagcctagggtgatcaggcctccggcctataaagaactgcaggatcagtgcggctcttttctcgagatggtaggtggctctgaaaagagcctttatgtccatcaaaggggccccgggggcggcgggcggcctcacttgcccttggccttgtggtggctctacgtcttcttgggcagcagtacggcctggatgttgggcaggacgccaccctgcgcgatggtcacgcgggccagcagcttgttgagctcctcgtcgttgcggatggccagctgcaggtgggcgcggatgatgcgcgtcttcttgttgtcgcgcgccgcgttgccggctagcttcaggatctcnggcagcaagtactcgaagcaccggtggcagatagaccggggcggccggcgcccactcgctcccgatagttggccttgc

SEQ ID NO: 756 - DNA, 580 bp, Homo sapiens
  Genbank Accession No. AI885852
tttactgatgaacgctggactgagagtggccagcattaacaactcttttatttgaaaacgtgggtggctctgaaaagagccttttgagttcacaggtgccccttcgagacgcgggccgggctgggcccacttgggccggacgtcagcctcacttgccctttgccttgtggtgactctccgtcttcttagggagcagtacggcctggatgttaggcaagacgccgccctgggcgatggtgactttgcccagcagcttgttcagttcctcgtcgttgcggatggccagctggaggtgacgagggatgatgcgcgtcttcttgttgtcccgagccgcgttgcccgccagctccaggatctcggcggtcagatactcgaggaccgcagccatgtagacgggcgcgccggcccccactcgctccgcgtagttgcctttgcgcagcaagcgatgcactcgccctaccgggaactgaatgccagcgcgggacgagcgcgacttggccttggcgcgggccttgccttcttgcttgccacgaccagacatgacagcgatagtagtcaccgagagaaactcctgcctggc

SEQ ID NO: 757 - DNA, 675 bp, Homo sapiens
  Genbank Accession No. AI887362
  misc_feature (1)..(675): n = a or c or g or t
tttttcaagtaaaaacttaaaacgtttatttctggtagaaatgataaatactttgcattaaaaatctggaattcaagttttcctcgtacttcatgctccctccctgccccagaaccttacaaaaatatttctgtctagagagggaaagagctggtgcctgctctggaggcaacgtccaggtccgggaaaggcactcgtggtctgtgatctgtctcagtgatgggaggtctccactcgccccacaggcagcctcggggccagagatgagaatatgctgtaatccagtacaggggctgcgtcgtgggtccccaacagctccttctttggggatagtgagccccttgttggggagtaggaagggactgaggggccagctccttccagatgtgtgcatggggaagggagtgtggtctggggaggntgtgtccaggtatagactccttttagggtctaaacgttcaaggagttcaacagaacaaccagaggccatcatgttttggcagcttgcaagtgaacactccaggggagatgcaggaggggaagggtgtagatctgggagcccttctcttcctctctgcccgcaagggaggcacaggggtggaaaattgggtgcttcattagaccccctgcccttgccacacccctttcacatcattgtaaagggtcccaaggggc

SEQ ID NO: 758 - DNA, 555 bp, Homo sapiens
  Genbank Accession No. AI888322
ttttttagaaattagtttattctttattatcacacagaataacaagaattagagttaaattcacaatatttttaaagaaaacattatgtgaagatgattcatttcaaaccaccagccaatttaacataaaacacttgtcaagctgagtagactgttttcttatgtgaaccacaaaatattttctctgaaatctacacttagtttaaaaacagagatgggattttgcatattagcttgaaaataagtatatgatgatgatattaggtgcccactagcacctagtttttacagctttgcattgtcaccccatcactgccagggacccagccccaggcatacacagatgaaaggacagtttcaccttcttggcaaaaaccttcagaacaattgtcaacatactctcaaatgtctttcccactcagaaatgaggagcaaggtgtatgactttagattcaagaagtatatggggctaaatatctttaaaagtataactctggacaatgtacttagggacctactacttactcaaaatagggtagtagcattaataactaa

SEQ ID NO: 759 - DNA, 473 bp, Homo sapiens
  Genbank Accession No. AI888493
aagtttttaaagtcatgtttattgaagtatgattttacattcagcaaaattcatcctgttaaggtttgacaaacgcacagtcataccataatcaagatgcagaactgtagaatcacactaacaattccttcctgcccttgtaatcaacccctttttgatcccaaggaactcactgacctgtttttctgtcaaaagtatcaaatttcatcactaaaatgatctacagtactatggaaaaatgtgtaagcacataaaatacacaaacctatttttttaaaagtgagatacttaaaatttctttagcataccaacaaaaaatgaaggtagcattgcattttactacagatgtgcggacattcaaagtccaccattgtcgtatatatggctcaacagtaatatttaagaatatactgctgggtatagtggctgacgcctgtaatcccagccctttgggaggctgaggcaggctgatc

SEQ ID NO: 760 - DNA, 528 bp, Homo sapiens
  Genbank Accession No. AI888991
ttttttttttttaatataatctctttatcatgttccccctaataactgttcattactgcttcagttcattttgtttacacttggcacatacatctctacagtacacagacacagacttatattttctatacattttttagcattgagttgcctttggatcaatatagaattagtagggatcagtgcaggaaataatattacctttttctgaaagtagagtcttacttatgtatatagcacctttgatttaaggatctcaagggactttaacattcactgtagcatacttctaatatctctgggtagggaaactattataaattatcattattgcctttttatagaaggaaaaaataaaagcaaagaaaagcgaagtgctcagtgagatgacagtcacagcagaaactcgggttttcagctcagcattctactttgtgaactgtaactctgtaatatattccatatcaaaaggtataatggtttcctccatttgtataacatctctctgtggatgatgttaaataaaag

SEQ ID NO: 761 - DNA, 495 bp, Homo sapiens
  Genbank Accession No. AI889178
aagtgaaaataaacatgtttttattgtttcatgctaaaagacatatttggcttcacacgcttacagctgggaagaatgcatatttttggcaaagaaggctcgagtaatctctgcacgttcacacggttgacccctccctgcatgaagagcagatggtgtttcatgcacagatttctggcacagtcctcctcttgtctgatgtaaaaggtgcgagtggacctctagccccctttccccttttgcttcttctgatcagtctcgcggtaaagagcaaatttagcacttcattaaggccactaacccaagtcaagctctggactctgaaagcactgagtctaccacagaatcacagaacataaaacagaattaacatgtggatagttttttgaaaaccgatggtagaaagtggtcctgaagggagggggcttagggtcatgacttctggtgtcttctagaagaaacatgtaagtccaggaaaagaggacttgaaaaaaa

SEQ ID NO: 762 - DNA, 479 bp, Homo sapiens
  Genbank Accession No. AI889959
ttttttttttttttttaagcacatagctacatatttattaaacaggaaaacatatatagagaaatttaccctcaataatcaaaaaatatacattcttttcaagtacaactggaagcattcactaaattaactatgtactaggccacaaagatgcaacaatatactccaaaaagttaatatcatgcaaatcatgttctctgacaataatccaatatagaaagaaagcaatgatacaattttaaaagaatataccagcaaactaaatatctaagaaaaccttcagttaaaaggaaatcatgaaagaagttaaaaaacacaaaattaaataacaatgaaaacagtaccagtcaaaacttatgagaaaagtctaataaagcatttagggaaaaaattatatctttaaatatcttattacagaataaacatcgaaagcaaatcaagcatttaagatgttgcttattttatagcaaacacaaatt

SEQ ID NO: 763 - DNA, 516 bp, Homo sapiens
  Genbank Accession No. AI890418
  misc_feature (1)..(516): n = a or c or g or t
gattttcaaattatttttattaggtaattttataatttcatagcagctgttaggatacacaaacatatatatacaattttctaaacaagtaaataaaagcagtttagtatatctgcctgaattcatattattcaaaatcttaccaaaatatttattataaaaatcagtaaaattgtttaacacatttataaaagttgctgggtatgtatacataaacattttaagcttgctttacaaaaaaaagttaaatttctatccatgtgctcatagtgacttcaaaggtagttcaaagggggaataaagaaggtagcattgccttgtaatacagcattaattaatactgacttacccttggacattcatgaaagatcctttgttatcacatatggtgaaaatattaaaaattaatactccatttctatgaataaaacatagaaaataagactntatttttccagactaactcattagcatgaaagactgcattcattctgcagatattactgacaccccgta

SEQ ID NO: 764 - DNA, 531 bp, Homo sapiens
  Genbank Accession No. AI890488
attccataaagcataagatattttaatgagaaaacgaaaacaaaatcaaaccttagtctcatgtttctatctaaagacactcaaaactagtttttccctgcccatccctttcctaactgcaactttatgtgtgaccatgtaataaaggccagtttaaagattttttttttaaaaaaagtttaaacccttttttaaaaagattaaacaatcaggctagcaaaaaggtactcaatacatattttccttatatcaaacaagctaatttcagtacaatataactatacagaatatatacaatacacatgttcacaaagcaaacactataggctcagaacagatttgaaaaaacatgatattcacattgattacaataaccctaaaaatgattgtaacgttgaaacggcacttagtttacaaaaaaggtcacaaaaatatatatatatatgtagtcaccaagaactatggttcctgtaaaatactaatagccagatactagtatataaaatgtgaagttctgatattgtatacatt

SEQ ID NO: 765 - DNA, 432 bp, Homo sapiens
  Genbank Accession No. AI911149
ttttatttaaaatagaaatttatttctcagagttctggaatctgggaagtccaatatcaaggtgtcagcatctgcagagggccttcttgctttgaccagcaaatatctccaccctccagggagaggtagtagcttctagggaaaccatcttggagagggtcctgtcttcccctgaggtgggctctgaatccagcactcttccccttggagggtcacttggaaccagctaacttttcagggtcctttcttcccagttagttgcacatggctggggaggcctcagaatcacagtgggaggcaaaaggtacttctcatacatctgtcatgtaacactttagtgttctatatttgcatagctgtatccttccattagtttgtatagagctgacttagtatttttggttgaataaatgttgaatgaccatgctctgc

SEQ ID NO: 766 - DNA, 396 bp, Homo sapiens
  Genbank Accession No. AI911346
ttagagttcattcaacaagagtttattgtggttgtactgtgagctcggccagagctgctgagtggcgggtgtggacggatctggtccgggatcatttcatggggccatggtctgttacatctaataacaaaaaatcggcgtgtctttctgttcatatcatttttctagtatttcttattgcattttacaaaggcattgctttgtgaagaactggaaattgagaaagaagccggatcctctgccacagataatgtgagacacgtggacacagcgtgtgtagtctgggtgggtcagggagctcctgccctgctcttctaagtggagacccgggtgctcagatacctgcacccctcccgcccatgcacacacaggagcccctcctagcaccaactcact

SEQ ID NO: 767 - DNA, 581 bp, Homo sapiens
  Genbank Accession No. AI912571
  misc_feature (1)..(581): n = a or c or g or t
tttaacatgttgccaattatctccatgtttatttaaatattttgctctaaaggaagcaatcattcctttatacttctttaaatttagtattgacatttttattttgggaaaggaggtcttttttttttttaacatggatacaggaaaagaaaactctccaataaaaatattgtctaaaaagtttgttttgtctgcatgatttactaaatatgtacaatttcaattcacagcgaaggtaacaaagatttaaacagccaacatcacaaatgtctcaagttctaaaaaaaaatcactgtgcacagtttaacaatttaattgaaaaaaccaaagctaagccttcagtctgaatctttttctatgatgggcacaagccatgtattttcttcatctttgttacacgatgcatatttcagtgactaaaagccccttcccattttagtatattaggttatgtcagtacatacttaagagaggcataaattgcctcttggtacaccaatatgatttgtgatgtgttcacatatatgtcataatatttattaatatatagaatgatcagatgagtcacctgtgattnttct

SEQ ID NO: 768 - DNA, 587 bp, Homo sapiens
  Genbank Accession No. AI912678
tttttttttttttaacatgttaaatactttattcacattgtttacaaactatatccacctggaaaacacatgaatccaaaatagattattttacagtaattcacattttttaaaacaagttactttgaagttcaactctaataaggaggtcttcagcctgtacagcgattcagtgcctcaccacttgattcctgctctggtgaaacagaagtcctaggggcagtccacctagctgtcagtcactgataacttacataccagtgattgatgagaaaatgtcagtgcagactttaacctatgaacatttattagtgtgaattcactgtcactatttttgtcaaggaaatacgtgttatagcacttgaatacacatcaggtagaaagacaaaacaaaaaagacacacaatttaatttgccattacagagttgttaggacatttccggttttataaacgtttaacatctggaccagagatggaatcaatgaatttcgattttattgtgttgacagcttgaatcacagaaacagcagtgattttgtaattgatgccagtgtctgttgactaactctgcatatcagatgccag

SEQ ID NO: 769 - DNA, 538 bp, Homo sapiens
  Genbank Accession No. AI912772
  misc_feature (1)..(538): n = a or c or g or t
gcggccgcccagtcaccacccttggaagggtgtcagggtctgggctcgcatgcaccctgctcccttctgccagcctgcatcctctcctcaggcctccttcccacatcatctgtcttctctaagttagggaaccatatttgagactttcaaaaagggaacttctaggtttaagctcctcccagtagattcctgaacctaattatcaggaaatcatcctgagcactcacaggttcatttaacactcactcatcaagcaccttcctatgtgctaggtgctggggaaaacttgaccaaggaagagttcctgtcctgaagcttccaggacccagctttttttttctggtgtggccttgtagctagtgcctgggcacaggtgtttttctttttgcagttttacctagtgcntgggagtcagttctttttcctctagaaaaatacctctgtgctccagagcctaatttttcccagatgcatatttagctctagggagaggactaggaggaaatccccctccctttagctgcctgaactgactgag

SEQ ID NO: 770 - DNA, 503 bp, Homo sapiens
  Genbank Accession No. AI913396
ttttttttaaagtattaatcttattttaatagtgcaaaatgtaatctgctttccaaccaatgaaagaaaaacttgcaaaaaatttatgaaactagtcaataccttgaacaaagaaaaacacaaataactaagtaaatattacaattgtgtactccaaacccaaaaaagcagagaccgtcattacaagccaaatcttttttagagttggttgttgcaggttactaaaatgcgtaaaacaaaatctctacttttcagacttacagaaaagaaataactccaataagaaagctaacttaagtttcatgggaaacagatcatattgatgactttaaaatgtttttcaaggagtttacggaacagaacatctatatcttgatttttatggcaaatgaggtttgtcttgacttttgaagcttatgtgtcttttgacgtatagctcagaagtaaaaaccaatcaagagggacaataacattcaggggatccacaggactttaacctgatc

SEQ ID NO: 771 - DNA, 564 bp, Homo sapiens
  Genbank Accession No. AI913749
  misc_feature (1)..(564): n = a or c or g or t
tagggttttgtaaatcatttattatgactgaaagggaagaaaatgataggagacaaatattacaattaaacatgtaacattattctcttgtaaccaatcataataacatactttgaatttttgaatggctatataatttcccagaaaataaaattttcacatcatcagttacagaaaattgatttccttccatcaaaatattttatctctgctctatcaaaaataaatgccaagtctaaggtactacacagtttaagataagccttcactacttgtttaaattagaggagtgtggggaggggcttaccaaatgatgaataaactactgcctgagaataaagccctcacacataagtaacagctctgtcaagcctctggctcaccaactaattattaaatggctctctaggaacttagaaactcttctgtatcccagccaaaaggcttctgagagtcatcacaaactggttaccagtttattctcaaaaacaaatttgcttattcgatgggcgactgtggctcanaagatgtaggggaaacagtcaattgaaatctattntgatg

SEQ ID NO: 772 - DNA, 475 bp, Homo sapiens
  Genbank Accession No. AI916544
ttagatttcttttttttttattttacaatttataaaacatcagccgcctgcccccgctcgcccccagctcagccccgagtggcccggcgcccgctcgttccctcctctcgcccctttgccgagtctttgtctggccccagccccgcggggccccgggtccctgtgccctcgggggtccctagaaggcgacaatggctcgagtccaggcgccgaggctggcgagcgcctgcttggcgcacagctgcccgttgagcggcggcggctgctccgaggagtccggctgtcggctcaccagccccgagaagccggagccaaagatggagatcaagtttgagatgttggacgcgtccggggacgagtccgggcagaagtcctcgaagcgggcgcgcttgcagggggcgaacggggcgcccccggggggctcggcccccagcccgcccgcatcctcctcgtcgtcttcctcctcctcctggcc

SEQ ID NO: 773 - DNA, 487 bp, Homo sapiens
  Genbank Accession No. AI916626
ttaataaattatttttatttatttataattacatgtacatacatatatgcatttgaatatctagaagaaactaccatttgcaatctcttttccatggttctaacctacttggaacataaccaagtgacaacatacaaacaagttctagattctaaacctgttttccactgcactgtaactgggggatgggactcagcaacagtgactccataagccagcaaatgattttcacctagagggagcaccagacttccaagagttgttgggatgtgggaggggaacactagtttggaaaaaagaccttaaatgattttgatacttctccctacagtatatatgcttccctacccctcacggcgacctacagcaagagtatcaaagaaacaagtctacggatttgaaatggcatgttgcttgcactatatattttaatctaaagtttattaaatgttaacgtgttgtcaaaatgcttttcataaaatgaaag

SEQ ID NO: 774 - DNA, 493 bp, Homo sapiens
  Genbank Accession No. AI917447
  misc_feature (1)..(493): n = a or c or g or t
aaataagtgacagttaacactgtcaagtacactgatttatcgaatatatatctgcaaactgtcaacaacatacaaaactcaaaggacttatggaagagtctgtctgcaaaaataaatctcttgtccatgaggggatgtgtataaagatagttctgtttccctgttggtttccaaggcacttctcatggctcctggtgtgctgctcctgtacggtctgctcacttatcctccatgcacactggactgacagccagccgggtaagaagccttgcgcatcttttatagtatgcaggaatggtgcagtctctggtgttgtgataaagtctatggaagtgtttgctgcactttggactaaaataaagagggcctgtaaggtgttttagaaacttgtccttcatcctcagatctcgaggaacaatttcttatcatgtttgacctgattgtgtcacanaagcattagacgctttcatgctttcctgngaaattccccgtg

SEQ ID NO: 775 - DNA, 519 bp, Homo sapiens
  Genbank Accession No. AI917901
tgccttcacaccactgacaggaacaataattcatcagaagcaacatctcttgcgacgtgcagtgattcccaggcccacagatgttcccctgtagagaacaagtgctagtgggttggtgcaagcaccaggagctcttctgaggaaaaggccttgcagttatttacatttatgattcttcaatgctggaagatcgtggatcaatcccaggctttgccagttctagctgtgtgaccctgggagaattacttaatgtatctgagcctcaatttcttcatttatgtagtcaatataatcatagttcctgcttcacattgctagaacttaaagagacaatgaatgtaaaatgctgagcccagtacttgaccataacaagtatagaattgacactagacgttgttatttaatagctcttccaaactagaaaactcagagctctgtctggtgggctggatgggattctattgtgaggtctttagcttcaaacaagtaataataatgacaatagtaagtactatattt

SEQ ID NO: 776 - DNA, 427 bp, Homo sapiens
  Genbank Accession No. AI921685
acttacaaaattaattttattttgcaaaactcaacaaatacatgttcagatctggtttctcttcaaaacatgtgtttgtttttttaacaaacatgcaagttaatttggcatgccaaacatctttctctctagctcaccttggaaaaatttttttcataacacaaacaagggtgcaaatattgtccaaacctatttacatttttaccctctagaattacatacattaatatttattgggaggaaagcaaaactgcaaaacgtagtctttggcattcacatttgcttcagcagtataattaaaaccttatatttgttttaaagataaacagtttgaaggaaatttaataaatcttgttttggctctgcaaaggagccactatatcaaagcatttaactggagctgttgagttcctgctggtagaatatt

SEQ ID NO: 777 - DNA, 544 bp, Homo sapiens
  Genbank Accession No. AI922892
  misc_feature (1)..(544): n = a or c or g or t
agttgtaaaatattttttattgtaaaaacaaagtcaataaaggttgacaatgtaaatgttatctcacaacatttccccttggttcctgaatttgctagattcctatgtaccagcaaatctccattagcatttctcaggtttcatgatccttttcagatatgttggttgattttatgtatatattgcttagaaacaaaaatccacctgatattaaaacaaaccaaaaaaaatcataaaagcaagcaaatgaacaaaaaaccctagttttgttgtgcttttctttcacatttcctacagggagatttgtatatctcagatactttcaaaatctaataggtaagtaaaattagtgccttaaccaaacagtaagataccaaagaatcctccatcacaagttactgaatcaaacttctcatgacatttgcggtatattcagatttgaagattttttaaatttagaatttaaaacaaactttagactgctgattntccatatttcaaagactgtagttgtttgcagcatataaatggaaagagtagtgca

SEQ ID NO: 778 - DNA, 512 bp, Homo sapiens
  Genbank Accession No. AI923108
  misc_feature (1)..(512): n = a or c or g or t
gttttggaacatttatgtaagattgtcatatgaaatgtatttgggaactacattaaacttttaactaaaaccctggcctctgcatgccccaggggcctcaggaagcccctgaccaggaacggcctccacctccccgggcgaggacctccagcagcctggggcctcatgctcccacccagcgtgtcaccagtgctggggtccagccacagccctgttctctccaccaccacccgcactttacccccacccctgctgcaaggccccgccggtctgcccccgcccagagctcccagcctcgggccgctcaccagaatgtagatactgggcccgctggacatgttacctgctatttttattccccatttgccatcttctgattgggnggtgatgttttacagatttttttttcaaaggctttatttcagtttctgaggttaggatgcccctgtgcccctcgctccacacctgggcaggtctaaacttccttccaggatggcctccacacacagcct

SEQ ID NO: 779 - DNA, 554 bp, Homo sapiens
  Genbank Accession No. AI924028
ttttttttttttttgcattctgaagtcgtttttattcgataactaacaccataataaccagagttccatctgagaggagaggagagtgagaaggggccagaaccctttggtggctgagaagcctcctcaaggctatgttggggcagtagggaggcagagaggtgaagatcttagggaagcccctgacccagcctaggctgctgcccacagggcaggaggaaagcccaggaggggagacaagacctccctgttgcaaccaggaggctgagcaaggcactggtgtttacagcccacagcttcacccgggaggggcgagggctcctgccctgcgagagcctttaggtgtacagttggggaaagggcagttcagctgttggctggagccagttctccgggctccaggtggtgccagaggcctccatgaggtggaaagtgtaggcctggcgcgagcggtcagagaggttctgcttgctcttgtgtaccacttctgcatggatgaagaccagggcccgtctctgcactgaggtgggcacaaagaggctgttatccccggc

SEQ ID NO: 780 - DNA, 384 bp, Homo sapiens
  Genbank Accession No. AI924465
caggacttgtttttatttcataaaaatcacaacatattggcacaacttagggtcatcatctttcttctactataaactaaacatttcattctttccaatttcttatttttggccaaattatgtatagataataaaagtactgcagaagccaaaacatagagcctataaataaagtgcatgactttcattcattggaaacaaaaggtttagacaggttttgttcattacttatcttgaaatattagctatatagatgaatacggcaacaattaaaaacaaataattccatctaaactaaagatagttccttacttgatttgtttcactagaaactaaataaggagaaatatccaagtgtacattgtaggaatacagtgttctcac

SEQ ID NO: 781 - DNA, 482 bp, Homo sapiens
  Genbank Accession No. AI924794
  misc_feature (1)..(482): n = a or c or g or t
ttttgcaaaagattagaaccattaaaatatttaattcttcaactttaaaaaattaaataaaatcaaaataggataatgaccagaatagtgccattataatcacatcaaaaagcttccattaacattttatgaatttggcaatctagtacaatacattaagtattgtgtttcactcaattttgtgatactccatttttgaaaaaacttagaggcttcagatacccatgaaaagaaaaaaatcagggtagaaacacataggctgaggtttgctaattcactgtttacagaggaccttagatgtcccactataattgctcttaggtatttttaacaaatgaatagtcataattcacagaaaagacaagtggtactttttatctacatagactatactatataaactttcagtaaaacatttaaattgttttacttttaatcttgtcaagtaattntcatttcttctacttcaaaaggttgaccag

SEQ ID NO: 782 - DNA, 598 bp, Homo sapiens
  Genbank Accession No. AI927695
ttttttttttttttggttttaaaaaggcaatttattgggggttttgaaatttaagccctttagataccacaaagttaccctcctggccttaagaaagatagctacgtttaagcactctaaactggaatatttatgtttagttacactggtaatttctaatgaatgggataatataactggctatctctttgcaatattttcaatatgtcctggtaaaaattatgcatctaggcatccctaagatgaatttgaaataaacctaaatactactatatatacaattatcccttgcaaatctgtttcctaaaacagatccataaacagatccaatatccttaaagtacatatatatcaagaaaaatgtaccctcactgaaatagaaaaaggcctttatttgtatcattttatgttaaatactggttagttactggtattgataagatctgggcagcagacaactaaccagatatgcattttcacagtatattcagatttcccataaaacttggcaatgtgtattaccagtgaaaatctaaagtttctacttgggaaggaatacccagtgatgggtaatccctcattctgagaacacagtcag

SEQ ID NO: 783 - DNA, 583 bp, Homo sapiens
  Genbank Accession No. AI928037
tttttttcatagtacaaaatttttaatatacatgcaacaggtatagtacgcatcaaggcaacagaatacacatggaaatattggcgtataattcagcattcttttggaggcaagagggagggtgaacaataaacactaccacctaaaattaaagattgagacatacatggtttcctcatgcaaacagtaacaaactacctttagtgtgaaacgaactctgtagaaacctgattttataacagcagatgaattttataccaagatctccaagaaaggaggaaaagtcatgatcctcagatgtaatgtttaaatctgcatttagcagcatgtgaagatgcacaaattacacattagacaaatctgaaaaattttacgattatggaatcttgaatttccttctacattataaaaatgtatgtaaaaccattgtttaattactaaaggataataaatgttggttgagagtggaccatgaatgataaagcatttaaacattctgatagttcataggaaagcagcaatagtgctcaagtccagcctaaaattttcaaatttctctttatccatttcctcactcccttct

SEQ ID NO: 784 - DNA, 470 bp, Homo sapiens
  Genbank Accession No. AI928296
  misc_feature (1)..(470): n = a or c or g or t
ttttttataaaacataaataatcatttatactccatgattagcaatggatcctgtctgaagtaaacaaggacaattaatacagtacaagatatttgtggttttgttttttataacccactaagccaagatttgtatctctgtatggaactgattttcaaatggacagaaatggtctttgatctttctgaaccacttgtcttcaaattcttctgaggatacagtcaccaaggcaagtcagggctacggagccaaacccaacccaaacctttttncaaaccnccctttcctcttgggggggggggggtttggggaaaaaaaaccccttttttttccccaaaatttttcccccctttttttttttttttttttgaaaaaattttttttttttttttttggatatctttccataacctcagctatcaacagcaaagtgtcttctttgaagctgaaccctttcattttatcttca

SEQ ID NO: 785 - DNA, 592 bp, Homo sapiens
  Genbank Accession No. AI928393
ggtgttcagttttgccaattttattgaaccaataaaattcctactaataacaatgaaataaatttctgcaagtataaatgtgatacagtttaacaaaacccattgttctgtacctataaatagattttcaaaatgtcataaaaagtgcagttatgaattgttaacatgttaatacacagttcctttatttcagatgtgtttgtcttgactcactaacagttccttctgcatctgtccaaataatgttaccctccctccaaagaaaaaaagagtcattaaagcactagaatattacacataaactgatccatttaggtcagctttagtcagaactgtaaaatcagcaaacataagaaaaacaaaacctagtaatacatacaaaagctttcatgggttctagaaccttcttaactgctgattcatgtggagggcattaagagttgaaaaggcttatatggttaactaccttagactatatctacagcagggtctggtttgccagaacaagtttaaagtggctgtttattaagtttgctattttcagaattgaaactataagaccgccatttgacactgaaacttgccctcgtgc

SEQ ID NO: 786 - DNA, 521 bp, Homo sapiens
  Genbank Accession No. AI934342
aaatatatgtaccaaactttaattttcatttcacactcaaaactcctgtagaaaaaaaggcaaagcaggcaaaaaaaattacaatgacttcagcaaacaacatttgaaaactgcaaaacagccttgggtctgtaatggcctttatagacgtagtgagaaaactgggttccaaggttttgaactctttaagacaaaattccaatgtttattactaacatttaaaaaatatttgtagctgcataggatacaagattgaatgagaagtctctgaattctactgcacaattggatcctaagattgggaggcttaatttttctttggggaaaacatgaaattatttttacttaaatgtgatgatgcatcagtaacctcagtttaccattaaggtcttaatttaatggtgataactaggagcaaatgttgatcaagcatgatgttaactagtagttaaaaggtaatatccaaactttctttctggttgttaatactccacccctaatgtgaagacatccatttccag

SEQ ID NO: 787 - DNA, 588 bp, Homo sapiens
  Genbank Accession No. AI934361
  misc_feature (1)..(588): n = a or c or g or t
atgttcaatttttggtttattaaaacaaaactacatttggtgtgtttcttgcaatacactaacaagcataaaaatcaatcagcatttccaagtatgttttgctcacaaaatcgcagttatttcacagtaccttatagtaattcttttcacgagtcttaacatttctttgtacaacaggcaaatagtttaataccttccatcaagacatttcagagctctagacgtttagaaataaggtcaagaatctctttcaaatgcaatcattagtttgtattaaactaaaatgccagacggcaagtctcaggtttctaaaatagttttaaaaaacaggtttacagcccatagtaagtcttagaaacctcaacgataggtcctgtcatgtctaaacactacaactatctgtggataaaaatctgcattcaaacgtacaatactttcttctagatctgaattaaaaccttatttaccccaattcatccatgtattctgatacgttcagtgaaaaagccaggatcattgnggctgttctctctatcaaaggaaagagctccgatcacctacattataattntctgtgcttattttctg

SEQ ID NO: 788 - DNA, 562 bp, Homo sapiens
  Genbank Accession No. AI934407
  misc_feature (1)..(562): n = a or c or g or t
aaaaattgacaatgtgcttttattttttttcttggtaaaagggaacaacattggaaaatcgttttcattaaatagacctttgtgattttactgatttacatgagtggcactaaattacatgatttataaggcttgacacaggaaggatacactgaggtatatggtaagaaaagggatatgaatactagagaaatgttaaattgataactaaggcacactttcggatgtgaatcataaatctaccactgtggctagaacagcctatatgtacatggattctgaaagacatgatcagttgctggtaaaagtagagagggcctgggcttctgccagtcccctggtacttcccacaccacttcagagaaaaagcatcatgacacaagcacagtagatggtagaggcccccagcactgagtcaggtgaagctacatggttcgctgtttagttacgtttccagtacttggtttaatttcacagtgagggagtcggttggtgatctctaaganatccccaagcacctggtgttgggaaagtccctcanataaagaagtgttcttttctt

SEQ ID NO: 789 - DNA, 450 bp, Homo sapiens
  Genbank Accession No. AI934881
tttttttttcagttccacaccgaatctggggatgtcaagtacacaacagccctgcaaacgccattccacgctgccttcaactaaatctgcgcgtctgatggcaaacgcgacagcctgggacttatgtcgaactcacggcgaaggcacagcgcgcgcgatacactcagggaaggctgggctggggaacgtatgggagcaaaggggcactccttacgcattaaaagtccgcgtatccccgtcagccaccgcccccctaacacgccattccagccttggtattacggattgaggcctgtcgtggcaaaacagctggaaaattgcccagcctagcagccggacagtcaggttacttcttgtcgctcgcggttaaaaaggccgcccgcgggaggccaggcggccccagttatgcgcaagcacatgctctagcgctgcagattgacccccggcgcc

SEQ ID NO: 790 - DNA, 532 bp, Homo sapiens
  Genbank Accession No. AI935353
  misc_feature (1)..(532): n = a or c or g or t
cacgaatttgttgaaaaccaaatgaatttgatagccaaattgagacaatttcagcaaatctgtaagcagtttgtatgtttagttggggtaatgaagtatttcagttttgtgaatagatgacctgtttttacttcctcaccctgaattcgttttgtaaatgtagagtttggatgtgtaactgaggcgggggggagttttcagtatttttttttgtgggggtgggggcaaaatatgttttcagttctttttcccttaagtctggcttagaatccttaagggcaaatgactcacggtgtaacagaaaacaagaaaatccaatatcaggataatcagaccaccacaggtttacagtttatagaaactagagcagttctcacgttgaggtctgtggaagagatgtccattggagaaatggctggtagttactcttttttccccccacccccttaatcagactntaaaagtgcttaaccccttanacttgttattttttacttgaagcattttgggatggtcttaacagggaagagag

SEQ ID NO: 791 - DNA, 845 bp, Homo sapiens
  Genbank Accession No. AI935522
  misc_feature (1)..(845): n = a or c or g or t
aatctttaatttaatttttattagagttgnggnttccttttcatgtttttgcttcataaagtgtaccacgaatctaacagcaatattatattaaatgtacatgtttgcagtaaattacaccctcatttaagaaatgtggaaaagttggggggaaagaggaaatcttaaaactgagttaagtcagcagttcagcaagtgcttacgaaagacagtcaaaatataggcaagttactttaaatgggtattatttgtccttactttcccaatgtaggcaagtgcctgtgatataacaatttagggaataatgggagaataaaaagcatattagtttcaatcagatttcctggcatatatcacagaccctaaggaattacaaagacaaaaaagcaagctctttggtttctgcatggttctttgcagactacaaggctgcccctgcaagcacttggatgaaaagaccgggattctactggaagtttgcactttccccacatcagccaagatgggtaaactgccttaacacanaagtcacatgccccacanaatatttccttctatctcanaacagtattagcttctttaatctaagaaaggtatgagagtttttanactgattaaatcagcttagttcatacanagtctattatgattaantattcanttannnacatttncaaaccanaatctgacanaatcctctctgaaaagtattagatgatagtntttacattanngcaattaatncttnctcacagtgtatttcctaaggtcagaacagttgcgagtcactgggcannatcttactgntgctatctgttcatgactnacagaactagataatacgt

SEQ ID NO: 792 - DNA, 405 bp, Homo sapiens
  Genbank Accession No. AI935915
gtcttctaagtcttcatgtctacagtgttattttttgctattattttttgtttcttcgacagtgacataaactgaggtaaacatctgtgaccaacacctctcctaaggggcaaagggtcccagcccgaccagcagaggaggtggcagcaccagggccccaacctggtgttccggttctgctctggggtcaggctggaggctggccctctgggtgcctctgggaatgagggggctgggctacataactatggtcccctcccaactctaacatactagatactacaacggctggggaaactcccgaacaggatcttaacagagagagggagagagagaaagagaggagagagagagagagagagagagagagagagagagagagagagagagggagagagagagcgc

SEQ ID NO: 793 - DNA, 506 bp, Homo sapiens
  Genbank Accession No. AI936699
ttaaataatgtcttcaccaaaaaaacagtcttgtaccaatagggtgcattcaaaaatagaaaatattacacaacaaaaatatgtatccttcctttccaaaaaagattcttcacaaaaaaatgtagaaaaaattccaacaatttttttcctctcctaaacattaaccttcagtctagggcacaattatttattgatttaaatgtctgtttttgcataaaacatggaagatgcaaaacatttactgtattaggattgtgaagttacagcccactcccacccttgctctaaaacaaaacaaaaccagaaaaaaaccagcaaacattaaacaaatgatagagtcagttggctaggaaaaataccgctgttcttccctttactgtgcatttgtatgggtaaacgggccagtttggtattggggaatgttgacgaagggagatcaggtttcaagattggattcaagagcttctttagcatatgctgataccaatgagtcactgacagtcccc

SEQ ID NO: 794 - DNA, 538 bp, Homo sapiens
  Genbank Accession No. AI936823
agtcagaaaaaaaaaatttctttttttgtctctctgtcaaccaggctcccctcagactcagattctgtatccatcaccttcacctaaatgacatcctcttcttcatgtcttccttctctttcttcaagtcctttgctttattttgaaggttcttttgcatctcttcataggtataagcaatttattgaaaccttttttaaaagtcaggcttcaatccaggaaaggatccatatgaattgtagcatcagacagcattcaatttcctctgcaaagacttcttcctatggaaatagactctcagtgatgaccaaagacagaaacttgagtagctcattaatttcactttccctaatatcaataaatcttaaacccacctgttttgcagacactaagattttttttaacttcttcattagctctagggaaatatgcatcattcacacatcctcccacagtttccagcaagcttaagagtggctgattttatatcacccatcacctcttttatcactaccaaagcatcggcaatattgtactg

SEQ ID NO: 795 - DNA, 522 bp, Homo sapiens
  Genbank Accession No. AI937060
  misc_feature (1)..(522): n = a or c or g or t
cgcatcagcatccttgctgctgccgatgctggaatggctagtgatgctgttgaggcttgagatgctatctgaggagttttgtctcttgatccgaagttctttgggtgtggtttctgaggcattaagggctccctgaatgactgcctgggcctcagagttctttttcttcagaaagtctatggtttctcgcaaatccagcagctcagtgtccttctcctcggccgtctctgccaggtgtcgcaggcgggatgtcatattcaccaggctctgctcaaaagcagccaccagattagcattggcagaaagctgagacgtcaaggtggccactttttcctgggatgattccagttccctacgaagcttccggatttgctcagattgcatcctctcctcagctgaggagtaggtggaggaggcactggaggccagggacagcactgagccgtgaacatcgtccgtggggtctcggaaggatcctgaccgaatcattcccttgngtctctcggccagggacagggtgct

SEQ ID NO: 796 - DNA, 530 bp, Homo sapiens
  Genbank Accession No. AI937365
  misc_feature (1)..(530): n = a or c or g or t
gcgtgaacagagttcttattgatagtcccatcacctccaaagcagtgggcccaccctccctcctaccagcccctccccagcacccagcccctcagtgcagcgccacctcgcaggggtggaggtgggcagcacgggcagcctcgtaggcacggcggaactcctggaatcgtggggcacagcccagccgggcctccccaaagcggctccagcccatgaagaggaaggtgcctgggcccgggtggacgccacagcgcantggggtacgaatggaggtcagcccctggtccccggatcgccccgcctggaacagcggcggtgtctggcggaggacacgggcggccaccacagtgatgacagactcctgcagctccacgtcatgggtgaccccatggatgatcccgtgaattacgaagtcgctggtgcatgcggccaggagcagctcagcgtcgctgcagggcctgcaggcaccgtctacgccgagaccgtgggcctgcgggggcagctcggggcgcccgtcctcgcgcctcgtg

SEQ ID NO: 797 - DNA, 483 bp, Homo sapiens
  Genbank Accession No. AI937390
tttttttttttgggtaaatgaaatcattttattgcacttgaccttaaactgtctctccgtaacctttctgccaacattaaggccaagtaggtgcaaattaaggtaagaagacagagtggatgggagtgggtgggtgaacaggacagaggaggccgccaggtggatttctcattggcggagaggacgcccaaaccctcagacctggcacccagcctggacagggtcgggatcctgcaggctccacggagcagcccctttgtttgtattctaatgtgttttgcagcacagaacagaagctgcactgttatgctggagcgtttcatgaacctcaagtcttttatctgaaatcgaagcttaaatgacttcttttatctgctggctcgtgggccagccccgtccagtggctgaatgaaaaggaggaaggccagtgctgtcccatttgcaggcttcaatgagctcgacagccctggatctcagagagca

SEQ ID NO: 798 - DNA, 456 bp, Homo sapiens
  Genbank Accession No. AI939507
gaaatcacaagggtatttattgtgataagtatccatgaaatcttcacaatttatgttcggagactgcagtaaagacaggtgtaagaaattataaaagtattaatttggggaactaataaatgttcatgaaatcttcacaatccacgttcttctgccatggcttcggccggtccctccgttcagggtccctgacttccggaaatcagaaaatatcttgaattgccgtaataaatagtaatgtcttctttctgatagccattccaaagtaggtatgagttctacttcctttacactaccaactatattaataacctttgagataaatgaagcagtaataacccaaaattctttgcaatgtttagcagtatgagccgatactacctgaagatcatatggattgtaaagggatttaggacttttccgaggaaggcaataaacaaattctccatcatcttc

SEQ ID NO: 799 - DNA, 434 bp, Homo sapiens
  Genbank Accession No. AI948551
ttttttttattcacagcatacttttatttaccaaagtacatcgtacattatacaaatcttaattacatttacattatacatttataatattaaaattgtgcgagtagtcttcaaatatctgacaactttggggtcagtgaattatttaagaaaaaactcagaagagttttgaaaaaggagcaggtgtgattctacaaattcaatatgaggcaccagtgggagaagtcaattggatgagcacatgaaatattaggagtgctcgtgagggggaagtaacaggtctattgtgtgcagtgctgggcaggctgcatatggagaatgtgttaaaagagcatttgcaaacttaagcattacttgaagatattaaacagaatgatggaagcctgggctttgattatttattgctgacatatgcattgcagtgatggcattaa

SEQ ID NO: 800 - DNA, 561 bp, Homo sapiens
  Genbank Accession No. AI949433
tttttacatgttcatatacatatttatatatatctcatgtacaaagttacattctgaaccccagggattccataatagaaataaatactgaaataactacattgctaaatgagctctttgctcatagaaatgaagctcagcctctaagagacagcaagtgggacattctagaacccatttttcagattatagaggcaagtaaaattctgatagaatgtcttggacaaaaaacgaatttggaacattaaaatggttaagatatattcaaatagagaaatgtatgacaaaattaataaaacttaatcttttaagagaaaagacagacatttagtgttacagaatagcataaccctgttagaaaagcatttatgatttccacatttaattttctcttctactcttcccatgttacaaagtgggaccaaatgagtccctttctgaacatgatcaattaagaagagccctaaatctggttgagtcctttggtaacggtcataatactcacaaggaaataaatattcagttccatggcatttgcaagacacatgttctttaggacag

SEQ ID NO: 801 - DNA, 553 bp, Homo sapiens
  Genbank Accession No. AI949698
tttgactttgttcttggtaaattcttgatactggtaggctctatcactgtccatgtcctgatctctacaaccctcaggtggctgggtcattgtccgtttgttagagatgtcctgtgggagatctactgccatgcgttttacctttctcctcctgcgcagagttctattcccaacattgtccacagcaaaatcagactcatgccatagaggtcttttccctcgaacattattatttaagtttgatgacggcctgcgctttgctactaacatttggtcatcagagtcactgtgatcttttttattattattgcgattctctctatagtccttgcttggttcttctaaactagaatcagagccttcacttaagcagtgaccagtctcccactggtgatgcacattatacgacctccgttttctccctctccttttccttgcctggcgtttcagagggcaagatatacttcgagaatggtctcctgtttcagcaaatccacctcgagcttgctctgagctctcttccaatgctgagacaaggtcatgaaccagctcc

SEQ ID NO: 802 - DNA, 519 bp, Homo sapiens
  Genbank Accession No. AI949833
ttttttttttttttcaactttgaaaatttctttattacagacatttcagaaccatttaaatcaacagacaaggaaatttttagacataacatactgtgtttatcttgaggtacacattgggcccattagataacgttttggaaagtaatgccattgttaactggtagttaacaacccaagttttccaagcaaagaaactgtaaagatggttacaaaattctttgaaaagaatacaccatttccatttaagataaactctccaaattcttaactgatttcaatttttaggcttagcttaaatattttaaatgaaacaatatgagagtgggagaaaaggtttatagctaagaaattatctgagccctactacatgagattgtaaacaaaggaaatttgcgatctgataagctctattacaaaatttatagcctaaaaattagagcagcaaaattacagaagatatttgtatatagtttaaactgaaatcacgtttattccttgtttctggctatcacaatg

SEQ ID NO: 803 - DNA, 464 bp, Homo sapiens
  Genbank Accession No. AI950023
ttttttttcctgttctttagaaataacagggctatccccctaggcagtggcccagtctcacactttttcagatgtttttatagatttctatttcccagtgattgcagaaactctctgcaattatttcttgcaaagactatcagatcatccaacattagactgacagacttctattttgctgaaataacaaatcgtgtcaatagaaagtcatttttcatctccaaatactgcaataaaaacctgagatgcttcccttatgatcgatttttaatttcctaacttctatagaaatttttcttcatggtttttatatttttggcatttctaacttaaaatatctaaaactctttaagttatatgcatgaagcatttgtgctttgattttaaaaaaaagttaatatcatgctgtttgaacaatgtgagccattaaagggtatgactgtgctaccatggtattctttttt

SEQ ID NO: 804 - DNA, 787 bp, Homo sapiens
  Genbank Accession No. AI951185
  misc_feature (1)..(787): n = a or c or g or t
tttttgctaaattcttttatttttgtttaaattttcacttcaattttaattcttgaagaacagcctcgacaacatatatcgcactcattataagaagcaaagggttatatcaaaaattattagtatagaatcacaggaaatctggtttggaaccagaaaaaaatacaaaacagatatagatacatagacacaggacaattttttataattatttggaaaaatggtatttccccctaattcttgtttcctttttctttatgcgcatacgatgtttaaattttacaaaaaatgaaaataaagactagtattttacaaaatgaataacaatgttcagtgtgtgtgtgtttctacataggcttcagtccacttccatatgtgttgttcctgtacagaatatatccacatccgtccacaataaatcctggaaggtccattagtttccttctgttttattaaaattctcatggtcctctcttccaatttgtttttctttttttcaccagacagacacaaggttcttttttntgtgggtttgttttcctcgccacgtgctcacagatctgatcctaaagagctcttttcccatgcttgtagctcggattggatcttgctggtgggctgctctgctcgnccctctccctccaccaagcctgcttgcccgctgacttttcctgtaccgcggngtttgaatcttggcccaagtgtcccttgattcttaggggacgggcagttgaagccccaggctatagccctgatgggcctgtaggccgtgactgtcccacagaca

SEQ ID NO: 805 - DNA, 472 bp, Homo sapiens
  Genbank Accession No. AI952965
tcatttttctaaacttttgtttattttgatagcaatcgtcatgtttagagaagtaaataacacatttaaaaaccttctcagggccaaaggatgccagagtatttacaaacacatggaggaagggcggcaagacatgaggggctggggctctggggctaggactctacccaggaccccgccccaggccctgagccaagcatggacgctgatgtcagccaccaggactgtcccactggccacagtgtgggctcagggaacattctggcagccgtggggttctgttcagtgggcctggtggagaccctctagccgacctgtggccccgcctcccatccagggggcttcccgtgccccacaggccagctcagaggggtctctgggaagcaccgaaggacagggggcagtgtgggggacacagggtctgggacagagacacgcacacacatacacacatacacacatacacactgta

SEQ ID NO: 806 - DNA, 480 bp, Homo sapiens
  Genbank Accession No. AI953053
tatataactgacatttaatgacatttccagaactcacattcttggattgggtgtcttctcagaagcgacagggtttcttcggtcgtcatccagtttgcttgcacaaaccctattcaagggttgcatttgtcgggctggatccagagcggagcctgactgggtgctttggccatgatggatgggggttactctcttctctgtagcagaactcctggaagactgaaccatgccactgaatcaggaaaataattatgttagatgtccccagtaacataagtctcctcttccattatttcctttattatgatttttatcattctctggcacagatatcaggtgaaggacgaaattaaaaggcagccagaatctgcccctcatctttgtaggcgccgtgacttgattttgtcagttccaataggttctgggctcttttgccatccggcttttctttggagcaaggaggagcatgaaaaagagatc

SEQ ID NO: 807 - DNA, 640 bp, Homo sapiens
  Genbank Accession No. AI953838
  misc_feature (1)..(640): n = a or c or g or t
ttttttttttttttttggcctttcaaagctttattcatagttcggaggccccgtgtgccccacttcccagacacccaggtctcggcgcccacacaggccccactgagtggtcctgtgtgtccacccgggaagcaccaggttgcccaccctccgaggctgggcagatggctggccagggcctcgaagaaggttccagaggtggccctcatgtggttccagctggccgaggtcacgaggagggacgcaggccccagccctgtgagggtctgggtggctcagtcgtgtggggctgcactcaggagcccccactgcagcgcaaggagggcccgcgcctgtggctgccgcggctcgcccgcctgttcgaagcgcgcccgctccttgcatagcgcctccaggacgtcggcggggaccgccttgcccgtgaacttgcgcaccggctcctctgccacccgcagggaaggggtgtagaggcgctcctcgcccagagtcgacggcacagtgggcacgtcatcctcatccctcttcttagcccaggacagcttggcttctcaacgtggtcgtgcangggctccactttctggccaaacctcaggtggcttaacgtgtgctcgtggccgcagaacacccttcgtctcggggg

SEQ ID NO: 808 - DNA, 435 bp, Homo sapiens
  Genbank Accession No. AI954874
tttttgccgtacagagatcaatatatataaagtgccggtacaacgctctgaaaaatagttttgtcccaaaatccagcgcctagggtgctccgggcctagcctttgccagtgaggtccaacggctgcaggaatgggggcagcggcagctcgtccagggcctcggggaagcggcctggagagatggcggtgaccagcacctgcatggcgcgcgcgaagagcgagggcggcgccaggcccgccagccactggaacttgtcctcacccagcagccgctgccagcgcggccggtcgcccagcagctcctggcgggccgagccggcggcacccacgggggtgtacagcgccaggaggtccagcagcagcaggcggcgctggcgcggctccccgggagctgaggcggaggctccggcggcggagggagtggccccggcgtcg

SEQ ID NO: 809 - DNA, 502 bp, Homo sapiens
  Genbank Accession No. AI956095
  misc_feature (1)..(502): n = a or c or g or t
tttgctgaaagccatctttattatggtctttgttaaactttgttgactaaaaagacaacaggaactctgtatacctgaataacagaaactcaaatgactcactgaaaatgaacagttactcatggcagaaataggtatatgtagaggagaaacttgcttcagtaagttactggaatcttccagagggtaatgcattttatatgcatctttaaaaaacgtattaaaaatggggccgggtgtggtggctcacacatgttatcccaccactttgggaggccgaggcaggtggatcacgaggtcaggagatcgagaccatcctggctaacacagtgaaaccctgtctctactaaaaatatcaaaaattagccgggcatggtggggggcgcctgtagtcccagctactagggaggctgaggcaggagaatggcgggaatccgggaggcagagcttgcagcgagccgagattgcgccactgcactccagcctgngtgacagaacgaga

SEQ ID NO: 810 - DNA, 462 bp, Homo sapiens
  Genbank Accession No. AI961206
  misc_feature (1)..(462): n = a or c or g or t
ttgatttttaatctttttttagccacagaccttttgttcaaaggaaaccttaaatggagatgtaacacgccagctgcttaaagacacaggctctgcaagagtgagtgtgggagtgggagggggctacagtctcgccagctgggccccctcgctgcttctgcccagctctccctgctgcagcactggcactgcagggaaccttcccagccacggggggctgagcctgggcctgtcaagccctgactggacattctccacagagaatgtttatggagtcagcacgaagccatgagaaggggcagcccangggccaaccaccctcacaggtcctccagggaggggccctcagagcttctcagcagggacagcaggttcagagctgagacaccgggcacgtggccagcacagatctgcagcacgcgcaccangcgctgcgccatggtggccctaaagccttccacc

SEQ ID NO: 811 - DNA, 696 bp, Homo sapiens
  Genbank Accession No. AI961431
  misc_feature (1)..(696): n = a or c or g or t
tttttttttgcagctagtgcggagttttattggctacaaaatagatgcaaaatgatgagaatctgaaggctgcagtaggaaagtagagctttaccctcataaactcgcactttgattagaaaagtgcaatatattaagagcattatgagaagtctggtgagactgttacagaaaaaaaaaaaaagtttctgagtctgataattccaagggtatcttttaagaactcactcactggtgtctgtgcaaggactttccttgggggaaaatagattttacaacaggcggaaactttcattggtctcatgcgtgcttttggatttcattcacttgacaaagaactaatcttccgttgatggtctcctgggttatggccttgatctttggagttgcagacactttcatgctcgactttgattcttcccgtgtcccttcactctctccctccaggagccgtcggtacgtggtgatttccttctccaggtgggttttgatgcccagcagcacttggtattcattgttctgccgctccagttcatggcgtagctgcgtcagttccctcctcatagtggngagatgatctccttgcatggtcctggagcttngcaggagtacccgagactgggtctcggataacatgtnttccaaagcaagattcgtgctgtactgtgtctgcaggtcaatctcaggggcctgaat

SEQ ID NO: 812 - DNA, 752 bp, Homo sapiens
  Genbank Accession No. AI962647
  misc_feature (1)..(752): n = a or c or g or t
ttttttttcaatgtttagattcattttattaggggcatatacaaagcaccatataatatatgaaacgtagaacaatcatgactatgtaattaactgtagaaataactgctaagaaaatatagcaatatttaacacaggatttctaaaaccattatattttcattacttttcccaaagctaatgacttcatttctgctactatcatctgatcttgtccggacatgggtgtcatggacttgtgactgctgtcgttctatttcatttgtttcctcttctcgagggggataatacctgtctgacccttctttgtagcacagattttctctacagccccctccaaaactaggtgggcaagcagaacagggccgcccatgtttgtaaggggcatggccccaccagtttccctttggggagtaattgcacaccaggtagacagctttgggccatatctgcccccagatgttcatgttatgacacaaattaatggcacaaccgattctgttactagttgcccacacgacctgtgtataatgtgtacatacagggccagaacacctgaatggacaatatgggttgcattcatgttcatatgggtagctaaagtctttcacttcatcataccacgattgtacatgaaacgtcgggggcctatatcttccccagtgtgctcccaaattctgtccaattgatggaagcaagcttgcagggtcatgtccccacaagcaactttcaagccaggaattntgagatct

SEQ ID NO: 813 - DNA, 391 bp, Homo sapiens
  Genbank Accession No. AI962986
  misc_feature (1)..(391): n = a or c or g or t
atctgaaatgaaagccatttctttttctttttctttttaaaggtagagaaaggcatttgtgtaaagagaggtgggaaagaagaaccaggggtgctctcaggtaaatcagttttaagaaaaaatatacatgaagattcctggaaattaagtttcttaaatacccatgctcctgtattccttaggcatgtgtccccagtttgaggacttttgacttagaggatttcaacagcctgtggaagctccataatgaatcaaagatgggtctcaagtcaacatcctctgtcagccacagattggaggcccatggaggactccaggccttaggagacagagggctggctatataggagaagcatggacccatgaatgactgaacagagcanagtcctct

SEQ ID NO: 814 - DNA, 427 bp, Homo sapiens
  Genbank Accession No. AI963725
ttaagtagagatgaggtttcaccatgttgtccaggctggtcttgaactcctgagctcaagcaccctgcctgcctcagcctcccaaagtgctgggattacaggcgtccatccatactcttgattcttaaaacaaccctatgaggcagttattatcaacaaacctgtattacaaataaggaaaatgaatacaaagaatttaagaaacttacacagggtcacacagctaagtaactaatggttgtttgatattacttacatatctctttatatatacctatatataacagatatttctttaaatattcggtatacatatatatgtttgtgtatatacacacctacacacacaaaaagataaggatatttccctactcagcacagagcagtgcacatattaatcactcaataaacaggagtttatttattt

SEQ ID NO: 815 - DNA, 704 bp, Homo sapiens
  Genbank Accession No. AI963873
ttttaagttatacacatccaattttattaacattcacttataaattatctgcccttgtcatatattggaatcgtgttttttaggcaaatataacaatcctctactgcaggagagaaagtcttcttggtgatatgagaaatactggtgtgataatttcataaattattcaagtctgtggaaacactccagttcagagaagggtacctggatttgttttcagctttctcgattttcacatgcacgttaggctatctggttttgatagtgcgtgttttcttctattaagtgagatagctttctcaataattatttcagaaacagcagcagtgagtgactagagggcctctactggcctcaggcattttctaaaaaccggaattagctgtcaaattttgagaatacagaacttcccacgggcctcccccatccctgcttttggtgtgcacctcacaatttcatgcaattttagtgacttggccaagctcctgcaggcatcctgtgtttggtgctgaagatgtctgtcttcctctgcggggcaccgtggtcgtggttcacagcattattggaatgggtccttgtggttagaatagcctgatttgttttttcaaggagggctttaacagcccgcttggaaggaacaccccatctttattggtagttgctctttcaacaaagttttgtttttttgaaatggattaataaag

SEQ ID NO: 816 - DNA, 528 bp, Homo sapiens
  Genbank Accession No. AI968151
aagcatccacagattgtttatttactgtttaaattactccatattttcatatactgtgaacagaaaatatattttaccccacatatagtaaaagcaaacaagtgcaatctttcaaacattaaaatcataatcaaatctgtacaacagataaataaatgtatacctctaacagttagcttgtaaaaaaaaatcaaacaaaaagcaaaaacatctatggcccaaattcaccagtttacttaaaattctacttatggtaatacagctcaatcataacaacttgcatgtttactacactgcacaagtttagactgataaatatttaaaataggaggtgggtaataggaaataccaaatggctataaagagctttccaaatattggaaataatatacgaaaattaattagtggggataacatattaaatggatccacagggtaactggtattacactggtatagcttgaggaaaggaaacaggtgaacgtttggattggaaaaaaaattttggcttttttataaaacgaagca

SEQ ID NO: 817 - DNA, 577 bp, Homo sapiens
  Genbank Accession No. AI968379
atgtttaattgtttattagtgtgtaccagttgtacaagaaaattgattttgggtggtatatgggtttcagtcattctgaagtacaatcatctctgtatcttcctttaaaattgccaaaattgtgcttttactccagctgaaccctggggttttgggtaaagtcattcactgtgattataccatcagggccaattacttcctgttccatgtagtttagcatcctgctgacatgtgatgcagagatctccccatccacttttgcaatatacgtgtagagaaactggaaggtgctgaacgggatccggggcgacccaccattatggtcacatgataagacctcacacactatcttgagagttttggtaatagtaactcccagagcgctgcaagcaagggctaaaaacttcagccactcgatctcctccgtgaagcgacccacattcatcacactattaaacagatctgttgggagattcaccactttccacatctgggccagctcctctgcacggatgatcagtctgccagcaacctgagaatgcaggatctttaacagctcaggtgttagctctgcccg

SEQ ID NO: 818 - DNA, 289 bp, Homo sapiens
  Genbank Accession No. AI968904
  misc_feature (1)..(289): n = a or c or g or t
tttcacttttaacgctcaggctgtatatttcagttccccccaaggccctcgagacggacgatttgccaaaataaccaggttcagtggcttctgtaaaaagtcacttcctctcagcaggaaaggcccagtttcgtggggctgggggagctggggcagtccgcctgcagcccctgaggtgggaagggtccccaggactaggcctttcccagcgggngnattggggaggggagggacaggagccaccttaaaagggaaaaggggggcggtccccagggcgagcactcccgct

SEQ ID NO: 819 - DNA, 329 bp, Homo sapiens
  Genbank Accession No. AI969879
tctttctttttttttttttggccttttttttttttttttttacaattttatttataacaatatctgtgttatttagttgtaaaggaattcagcaaaaattattaaaacgttcacgtccccaaaacggggctgcccgctttcccttcctggggggggcccacctccttggcgtccccaggggaggggaggctggaggaatgtttaccaaaggaagtctccagccctgggaacctcggtgggggccctggagacagggagggcctgtctgggaggggggttgagcatggccatctcataggtgcccctggagttggggctggggtttgggg

SEQ ID NO: 820 - DNA, 452 bp, Homo sapiens
  Genbank Accession No. AI970823
tgcatttttcagactcttttactgtaccttataaccaagatcgggtgaggtgtgcaaaccaagggccctgtcccctccaaaccagcagagcccggggcatgaggatggcaagcgaagtgacaacataaacacaggtgtctccatcatcaaggatgggagtggaacggacagcaagggccaggtcacccccagagcattcgtcagttgtcaagtccaaagctaagaaatcagttcataaatgttttttgatttgcatgttggctcaagccctctttttaagtccaaggaggcagtccacattaagtgtgcaggcaaaaaagagatggaaaaaggagtcagtttctcccctgccctccctctctccctttatcaagctgagcaccttgagttgcatttgaggaaatgaaaactataggtgacgcaaccccattgtgtcgaattctttctttaca

SEQ ID NO: 821 - DNA, 514 bp, Homo sapiens
  Genbank Accession No. AI970896
tttttttttttttttattaaaatgtctgggattacttatgtctcagcattcatctggtaacttaagcagcatgaagcaagagttgcactttaaaaaatgacaagaaaatagctattcatttagtcgacagagtaaggcccatctcatttccaggatcactagtttctgcttatgacggggtgagcatccgccagcgcggtgattgggaggcgcccctgtgtctttaggctgaggcagtgcccatagctgcagtgcctcgaggttccggaaccaaccggggggctctttcttgaggagtcttgggaggggcggtggcctgcctccccatcctagatcagcgaggtcccaagagtgcgtattgctgcggggtagctgtggagtgtagacacgttccggaggtggcttgacatcctgaggctggggtggtgtgaagggaaagaaagaggggcaggtcccgggctttgctggctctgcttctcagggtcaggccaatgggtctgcagagcagtgcagc

SEQ ID NO: 822 - DNA, 382 bp, Homo sapiens
  Genbank Accession No. AI970898
ccttcaaaaaatattttattctgcacatttcctagtaggctctctgcccaccgttccagggtagcagctactcataacttgtctttctctccaaaaccaagagggccttcccaacagaaaaaccttcagttcccaaagcagcatcgattcttcccctcaccccagcaaacctcggggtggaataatgaatcattcaccttctcccacccctcactgccccgccccaccttcatttgccaggactgtcactggctgatggtcagattttggcttttttcaacttggataccctcaagcatcccagcttttggaggcttccctgggcaacctcatgggcttccacattgaccaggcattacattcagcatccttggacaaacca

SEQ ID NO: 823 - DNA, 467 bp, Homo sapiens
  Genbank Accession No. AI971441
tgcagggattggttaaatgcttttatattagtttttctatgacaagaaaaatcagctttgagatttttatcatttttttccttagaaaagaataaaaaataaaggcacccggaacttcccccacaggcctgaagaacaaaggtgcctcctaggtgcagctgggtccttcctccctggctcagcccagccccatcacctctgcttcactcctgccccaaggccccagcagcacccagggggctctcccatcctgcctccactgggcttgcccattggaaaagtgcctgtgtcctgccagggcgtggcagggagggactcttagcagagtgactgcccagcacctggaggagcagggtgggccaggccaggcccgggctcctcagggctcagtaccagcaccggctcctcctccgcaaattcgttctcttcggggctcaggctgtggccgccacttcggccaaatcctg

SEQ ID NO: 824 - DNA, 573 bp, Homo sapiens
  Genbank Accession No. AI971679
tgcaagatttgaaaagtttattatatgtaagatatatgtttacggaaaagcctctaaaaacataagacaatggagctttaaaaaaggttaggttttacatctttaaaactcattaataagataccaaattcaagagattatagttacattgtaaaacgtaatcttcttttaataaaagctaataatgactgatgaattacaaatgcacttatttattggtgattacaaacaatacttaagaacttaagcagcttgagtagtaggtttaagctagacagagcaaagaaaattcttgtttaatatatatatatttttaattccagtaatattttcttaaattcctgttaaaaatataatcaatattaaagtcagcaaaatgcctttgactgacgcctggattattttaccacttaacctggttacacagtgattttttttttttttctgtcagatgtaactgacaaccagtttagtctttctttaagataaatgaagtgataactcacattgcagcatcttgtggaaaatattcaaactacatttaaaatgcttctgtaaaatggagaactctat

SEQ ID NO: 825 - DNA, 573 bp, Homo sapiens
  Genbank Accession No. AI971695
  misc_feature (1)..(573): n = a or c or g or t
ttagaaacagaattatttttattgctaggttaatttattacaaagataataatagtctgttgaacttagttacagttaaacacactgtaccgattcaaaatcattatactagtttgatagggaggagggatgggggagtgggctggggttccaggaattggaagtatcagggtggaaataggaactttataccaagccccatgaccagctgtgcttcaagtgagttttaaaattaattggtcccttccctgaagagggtctgggctcagaagaaacaggaactggtagagctgcaccctgtccacagtgatccactactaaaaatactcatacctaggaggaccttaaacttctgaatgctggttcagtaaggctccactgtaaaatcaaacatcttttgtggtattcatttttttattgcttgatgtctggaacagttaccgaaactagacctgtatcgcgcatctctactagtgcttgggcctcatagcagtgctcgtcacctaactgcacaaagaaatgctattangtccaattgtgagataagctgaattataaatacacaattttcag

SEQ ID NO: 826 - DNA, 841 bp, Homo sapiens
  Genbank Accession No. AI971748
gcggccgctcgcaccgcggctcctgccagctcactctgagagattgggccccagggcagagaacaccaggcgggtgggcgtgtcgggcacaccagcagtcaggcgagagtcgtgggaggagacggaggtgagggtggagtagtccctgggcagtgtggtcgagtgtgagtgttctgagcgggtcagtgagttgtagtcccgtgtgagggtggaggatgtgcttagcacgcggaggggcacgtgtgggctcaggtgggtgccataggcagcagcactggtcgtggtcatcctcaggccggataaagaggggcacccgtacgtccaccagctccacgccctcctggaactccaccatgccccgggcgtcctggtctgcagtgagggtgtagtagccgggggccaccttgaggtcgtggaaggccctctgttccacctgcttctctgtaagcttcagcagggccggcttggccgagcggggcgccatcagcactgtgtccacaatggtgtggtcttgctttttcccggcattgggctgctgacggaacttggtctgctggagcttgtgtacaccggagatctgtctgtagacctaggtccagatgctctccagcttctggcgcagctgtgcgcactccagagtgtcatgcttcagcaggttctcggcgcataggcgggccaggcgcatggacagcccgtagggcaccagctctgtggggtcgatgctggctgcatgagtcgcagaggcaggccggtgcatgttgttggggacctttcagcgtaccagtcatcggccttgacattccggtgcgcagcattgactagtcctagtggtacgaggcca

SEQ ID NO: 827 - DNA, 478 bp, Homo sapiens
  Genbank Accession No. AI971914
tttttcacagggccaaatgttcccctttattatggttcactcagttaccaaagacagacacattggctcaggcagctcaactgccagctggggaacatccagctccagaaacagggagcagcagcggcaccaggagaatggcaaagcaggtcactgggaccccagaactgacctgggccctccttcacccgaccccaggccagaccttcctacaaagatgaatgtgtgccctgcccccacttctcatactggttctctccccgggaaagtgcatagttgcctggagatgcagcatcccagggcctgaacaagctgggccacacaccgggatcaggcttcccaagggtagagccagagcatggccatataggtccaagccaaagaggcaggtaggacaggaaactgattggaggtaacatccaacaggtcatggatgctaggcagggagctggatcacaggcctcctggagctaccaga

SEQ ID NO: 828 - DNA, 354 bp, Homo sapiens
  Genbank Accession No. AI972237
  misc_feature (1)..(354): n = a or c or g or t
ccatttatgtctttattggttctggtgatcagtacaactgctttgacttcaagtgtcatcattcactcttttgtgttctagtgatcattcattccagcctccagtgagaaacacaacagaggcagtttttattttaataatcatgcaaagaaaaatgtagtgaaattaaaaataaatggccctacttcaggtaaagaaaaatactaggataaattcaactacatttatgaagaagaaattcaaatactgaatcaaaaatttgaaaactcctgattngtattgtgttttcttttcactggtaatcaaaaccaagtaatcttagtagctaaaacttcaataaatgactgacttctg

SEQ ID NO: 829 - DNA, 524 bp, Homo sapiens
  Genbank Accession No. AI972357
  misc_feature (1)..(524): n = a or c or g or t
tctgaagtgtttttttttaatattgtataaaaaatccaacttgttccacaagtacatatgtcctatgattttatgcatacatccatatacatatatcaaggtaaagtccagtaaaaaaaaacagcattttctatggccagtgttctacagaagtaagactgtgcaaactttatcgtatagtcaaatgagattgcacactaaggcaggatgaggcagaagcaagttgtgtccacagtatattacaaaataccttgcatagcttattcattctcacctggtaaattcatcttagaattctgaaggatgtctttcctagataaatttatacaagttagtgtatacttcttgtctttgttctgtggcaaaccaggattctcagtactgattgttttacttcacaacattattgatttaacaatagcctgagctttngggctctgcactgcgttcattgtaatccgtgatacaatgactacaaatgtgtcgcgatttctaatcttcatctgtatctcaggcgattttcc

SEQ ID NO: 830 - DNA, 546 bp, Homo sapiens
  Genbank Accession No. AI972498
aaaaaaaaggaattatttttatttgcattgggcatttttggcgattcagactgagaaatgatgagcccttttctgttgttgttttttagtagctcacatgggtgctctttagttctaataaaactccccatttttgttgaaatgaggagatttgtgaaccagaaacccaaaaaccaaaaaaacacccacacagctgtcttatacttctgtaaccatttctgaacttaaaactctcttgttcggtacacctcatttatttgcatcttaagttttagcttgtcaaagatcttttagtagctctaacatagcccactagctaagtcttgtaaatgtgtataagctggacatttggtaatattatttttaaaaaaggaaaaggaggaataggtatacttatttaatacttattgtgcaccagaggctaagtgcttgacttttattctctcatttgatcttcatgaccattctatgaagtgggtgttatcatcattcccattgtgcagataaagtggagggtaggaaagaaggagaagggtatggagcctt

SEQ ID NO: 831 - DNA, 494 bp, Homo sapiens
  Genbank Accession No. AI972661
aacccacccctggtcttagttccttttgccctgggagaggttttccctctcccagacggaaagaagcatcctttgctttttcaagaacttttcgaactttttcaagaagtcttcaactctccaaaaacatcttctctcccaactagacggtcttgctcctaaatcttggctccaggctgagggccattttgaagccgagttaattgtcctccagcgagatgacttgggatgagatcagagcaagagctgtgtcggttaagtgtgagaaagaggccagaccggctaccgattgaggcttacaccgggtttctaaggcctcttgggccaaagcagcccttacaggattagaggcttcaaccaaggcccatgctgcagcccccatctgggctctttccagtcctggcaattcacaccaccaattccatctggctgggcatcttttgcctctctagggtccccaccctgagcctcaacactgaactttcagggctttt

SEQ ID NO: 832 - DNA, 594 bp, Homo sapiens
  Genbank Accession No. AI972873
tttttcagtttatttccatttattattctttaaggatacatacatggagataaagtgatgaaagacaagaaggctatggtcaacacaaagttcagtacaggggttccctctatcagacagggatagagataggttcaggaaaccgcacacggtacctcaaaggaaaggcaatgaggtgggtggtaggcacacaggggtttgtttattgtcattattattactctttatactttagcatatatattatatgtgtatatacatatctatattccattgcatgtatgaaattttttaaaaattcaaatggcttataacaaaaacaaattatgtataatgtctcaaatggtgaatcacagcctggaggctcttaatttacctccactctatcattgaaccctggctaaaactgctgctttgtttctattcccctcatacttgagagtagagatattgccctgctctgacaacacttaccacattttaggggcttgatccatgctgacagaaaggatgaacaaacaaacctgacatgtatttctagaagaactaggaaaactctgaagatttgaatcacaagtaggcagtgatcatttt

SEQ ID NO: 833 - DNA, 399 bp, Homo sapiens
  Genbank Accession No. AI973225
gttagtgtcattttagccacaaaactttatttacaaagttttttagaatatacttgctatccacccactattccaagagtaaaatgatgtcaagtagattacacaagagcataaaacagagaaaacaagtctacaatatatacagtgccataagtggttgctatttttacagttttcttttaaagataatctactgaattttttttgctgataacacttcagagtgatgttgtcttcaaatgtagatttccacagggattcaagagtataacagtccaatatattttataggtggtatctgacattacgaataactgcaaatcatttttttcccctttttttttcaaaagtcttggaggatgaagaattatgactttcaccaccactatagtgttcata

SEQ ID NO: 834 - DNA, 516 bp, Homo sapiens
  Genbank Accession No. AI978650
gaaagagagagaaggagatatttatttgaatgaattggctcacattatcgtggggattggcaaatctaaaatgtatagaacaggctggcacgctgtaacctcaagcaaggagttgatgctgcaggcttgatgaagaaattcttctccgggaaacatcaggttttgctctcaaggccttcaactgattgggtgaggtccacccacaacatccaggagatctgtaatcccagctatcaggaggctgagactacaggcgcctgccaccatgcctggctaatttttgtatctttagtagagacagggtttcatcatgttggccaggctggtcttcaactcctgtcctcaggtgatccgcccgcctcagcctcccgaagtgctgggattataggcatgagccaccctgcctggccgacttagccagttttttaaaagctaggatggttaatatactgcatacgctataaatccccaggatctaaggaagccctctataatcaaacacgagcatacttcctt

SEQ ID NO: 835 - DNA, 498 bp, Homo sapiens
  Genbank Accession No. AI978710
gtctttgaaaacaatcaaatataatccttaatgtttctttacattgtcatcaagtattagtaacagtgacttctagtgaacaccttgatccttaaaccacaggtctaagttcagttttgtgattcctttcatttttacactcaaccctgaatatggacaagaccggttagtgtgacctgttattttaggaattacaactttaaaaaatttctaatagccacaatctaaatgtgcaattcaaagcttttaacaatttccatgttctaaagtttctaagagtcttgaggttatgctagggctcctggttaaagtaactgccaactgggactgtatgtcacctaagtcaggataactccctggtgaagttacttttatttcaggttctgtattatttctcttagccatattatacccgtaactgtcctttttacagaaacccttccaacttaagagcctgcaaggaagtcatatactgcccaaaaatgcccacataagttg

SEQ ID NO: 836 - DNA, 809 bp, Homo sapiens
  Genbank Accession No. AI979261
  misc_feature (1)..(809): n = a or c or g or t
tttaatgcatttgaatctttattctacaacacaagcaacataaatacaatatcttttaaaatattttctctttagaattttcatttccacctcagataaaatgtacacaaaatacacttgcaagcttgcttacagagacctgttaaacaaagaacagacagattctataaaatcagttatatcaacatataaaggagtgtgattttcagtttgtttttttaagtaaatatgaccaaactgactaaataagaaggcaaaacaaaaaattatgcttccttgacaaggcctttggagtaaacaaaatgcttcaaggctcctggtgaatggggttgcaaggatgaattttgcattttataggtaaaatggtatactgactcaaatcattatggctataacaagcttcatttatttataatcttcaatgaaaataagttgattctttggcataatactataaggaataaaaggacccataccacccactggctntatctagagtgggagatagtagtagggggactgtntataatgtaatttggctaagttattcctcctagaaaagcgggaaaagcatattgggatatagtctcttagcatgattaggggcataaacatcttattcttatctgtcccattcccacaacacaacactaagaaacanaaataactttttcctttaaggcacctctccttgcccatcatggcacaaccctgatattctatcacatggttcaaactgagtgaaacccaactatcaaaagcatccaactttggtaggtttggcccatttggggggaaacaattttatt

SEQ ID NO: 837 - DNA, 503 bp, Homo sapiens
  Genbank Accession No. AI982669
ttttttttactttgtgtgttgtgttttattaacaccaaaatgtgccacatcatggtttagaagaggtggagggtgcaggcaggaggctccgaaggcccaggcagggccgccagcctctggcctctccatggactccagctggagagcctgtccgctcagcaacaccccaggcagcaccaagaataacatgcccacaagaacatcatggccaagagacgcacaggcgcatcccgctttcaggcaccttttcccacctggccagaagtccctgctgtcatcccgacttgcacggtggttttggtaaccagtgggctgtgcaggagtgaaagtggggtcactttccttcctttcccagctgctggagtcggaactgctgcctttgtttggcggccttgtttcttaaatcagttccctcttaggatttattacactaaaaaaaaaattagtttttgaaaagaaataggagaatacagaaacatgaatttcacgaggctatcatctaa

SEQ ID NO: 838 - DNA, 566 bp, Homo sapiens
  Genbank Accession No. AI983045
  misc_feature (1)..(566): n = a or c or g or t
tttgtcttcctattcacattacaaaaggaaagggcaaggttctgcagaactgacgaaggaactaacagatactacaaaaatattacaatttgtgaagattagctcaaccctctcagcttttatgaatggagcggggaggggcccaggctgagtgggaagggcatgggagtgagggggccagctagttctatggaatagtttgatttttttctcttccttccccaccaatggtgaatgacatctttgctgttaaaaatactgttttctgggatttacagatcccctgagggccagccagtccccgcttcttcccagaccagaggaggaagccatagtgcataatgatttcttacagacggcccctcccccaaatgatttcacccttttcacattataaacatgacaactgttctagtcacgtatttcaagtttaacttcttttcctttccaaaacactaagtcgttactatagttgcaaaatagcatcctccctactttaccatccctaatccacagtctagtgacaccgtcctcccaattcacatcctcccaacacacaattntaa

SEQ ID NO: 839 - DNA, 479 bp, Homo sapiens
  Genbank Accession No. AI984087
gagggaaacataagtataaatttactatccacctagtggtagctaggtaaaattgcaggcataaagataaaaaagaaatcatcaactttgtagttcctcagcttcaaacccaaacctgcaagggagaggagagacccagacgcctcagggaccaggcagataatacaaataaatgaaacaggccaggtgagagagtacaagtcttgccaaaagaagaaacccctacttaggttccaatggatggtcctcttctgaaaatgcagatcagaattgccacacattctgaccgatcgagagaggccagaaattctaattttaatgtgaaacctcttgatttcttagacggtggctcaattttcttgaaaacactaggtgagctaaataaagctgacagtccaccagttttcaatactcctcttgcagagagtgaatggcatctcccctaactgtagtattagactgccactcaccagccacag

SEQ ID NO: 840 - DNA, 765 bp, Homo sapiens
  Genbank Accession No. AI985653
  misc_feature (1)..(765): n = a or c or g or t
tcacatttttaaagtttattcatgaatggtttaatttccctttaaagctagaaaataaagatcatttaccttctgatcttcgtttttccaaatggtaataagcattgatccttccctctaataaaggtgaaatttttaaaatctcagtgaataggaatgtgcaaagctctaagaaaactattacttgaatgtctctaaagtggtagaagatcacaagttgggaataccctcaaaaactatatttttaccctactggtaaaacttgttttcaaagtggtgtaatctgaaagattacagttcaaaagtaattcccataccaaataatatcaactttaggtgaacatctaagtatttaagagtattatttttcttggctgggtgcggcagctcacacctgtaatcccagcactttgggaggccgaggcaggcggattcaggagtttgagcccagcctgaccaacatggtgaaaccttgtctctactaaaaatacaaaaattagccgggcttgttggctcacacctgtaatcccagctactcaggcggctgagccatgagaatcacttgaacccaagaggcggaagctgcagtgaggtagatcacaccactgccctccagcctgggcaacaaagcaagactctgtctcaaaaaaaaaagaaagaattactttttcttgatcggaatttctgaatttcatacattttctttccaggtcatttnttnttaagggacataccacaccactcagacattatgacttagcttct

SEQ ID NO: 841 - DNA, 567 bp, Homo sapiens
  Genbank Accession No. AI989588
ttttttttagttcctgagtcgaagtgccttacacagtgcacacaagccccataacctggcacactaacaatcagatgcagtgacagagcctgggttgctatattcatgacactttcatacaaaatgaggtttcaatgttacattcccacttttcgtatttcctgagtattcctaataagagaagagctggaagtaatgaatcctctgtattcggctctgattagtcacaggataagctttcaagggacactttacattagcactgggaaatgctgcacaaagcaagctagactcaagacctagtattttataacctttatggagttttgctccaaagtaaactcttttgactaacaaacttaaaaatctgactgaagtatttacactattcacagtattcacaaattactttatagagtggactctctgatggcgcataacgaccgatctgtgcctgaaagcctttccacattcattacatatataagcttcattcccagaatgaattatctgatgctgaacaagggctgagctccatttgaatgttctgccacattcattacactg

SEQ ID NO: 842 - DNA, 722 bp, Homo sapiens
  Genbank Accession No. AI989871
  misc_feature (1)..(722): n = a or c or g or t
ccgtctctgtgagagcctggtcagtctgtaatattgcatgactcacagactccttggactttaaatatttctgcagaacttcttcagcctgtattcctttccgaggctcccgatagtactttgccttcagttcttctgttttctgaatgaagagattatggcctcctggcttagaataaattccctgcttcactgcttcttctagaggaccaaaaatatccttaagtaaagccgagcaaatattcccgagatgcttccaggttccgtttacaaatgtcattctgttttgcatctagtagagtctccaattctttctggaaactttggtctacatccttgaaagagtttttcatgaagacttcaatggcctccctctcactggtcctgtgcaggtccagcagctcctggagggtttccatgggcagctgcactttctggcccatttgctggtcatagtgggcaatggccttttgcactgcagctgagttctctctctgagccaaggccaggactgcattctctatgcaaggcagatccccactgctgatggcattgacataggtcagcaccaggttcattagacgagatccattgaccatgatgccacctgnaagagtnctggtcatagaatggctaaagatgtangaaacagaatctgtcactttgtgcacanattcaggctctagctcatcatcagggcagtgttcaagtggggcaagctt

SEQ ID NO: 843 - DNA, 452 bp, Homo sapiens
  Genbank Accession No. AI990026
tttttaagagagaggcaattttattcttccaaaaaaatgcaccaagagagggtgagcacaggagcacccctggccacatcccccatcctaagcagggtctgagatgaggccaggcctgacgtgggcttgctcgcttgctcgcttgctcctcagtcctagcttcatcaaacactggttcctggaatcctgtctgctgtcttgctctcgaagtgggtctggatatgctcagtggtgtcccccccaccaatccgccagtgcagcaggccactgtcaaactcctgcacacgcccaagcttatctgagcagtccaccacaaatggatcattcttctgtacgatctttactggaagcttgtcaaacttactgatcagcttccttcaccaaatcgcactggctcctggactcttttcctatcttcaccacgaactgctgcttgctccttcctggaatcc

SEQ ID NO: 844 - DNA, 481 bp, Homo sapiens
  Genbank Accession No. AI990405
ttttttttttttttaactgctgccaccaccatgaaagagtggccaccacatctttattgcatactcaggtgaataacttattatacaatgaacactcctccattaggagaccatgcccacttacagaatgcagccgtaaatgcggtaaatctatttacagaggttggggtgcaagatgagagaagtatcagccccaggaatttgaagtgagaatgatctacaaattctcctgacaaggagcaaccgggcttgtgctagtgaggtctgaaagaattcctggcagagcgtagggggagattagatctcggaattgacagaatcaaagaagcaacctcatcaccagtctccccattactactcctatggcagatgttatcgatctacagtctggtcctgtggcctaatactaccgggcctgaagataatactggaatgcttcctgaagcaaccacagctggcaaagtttaaacctgcctgcctc

SEQ ID NO: 845 - DNA, 744 bp, Homo sapiens
  Genbank Accession No. AI990409
  misc_feature (1)..(744): n = a or c or g or t
caacattaaatgactatttatttttcaggtttaaaagatttcaaaatacatatgtacaagataaataaactacacaaaaattatgtcatcaaatatatttaaaaaaaaattcaaggtaggcaacttagatcaccttggcaaagaacacattaactaagatgaaccaggacaagtcccctaaacatcaggatgaaatttcttttctatgcctactagctgactggccttccttttctgtgttgagttgtgtactctggagtcaccagcctctggtagattatcaagcatctcttcctcatcagccttttgtttctgtcttgcatgcttctctgtccactgtctggcattcttgaggaaggctggcttattatatttaaattctgaggatatgtcagccatgagcgggtcatcagggttgggttctgacatgagcagctgaatagaggtcaacacagttgcgatgttgagggatggtctccaagcaccttttggtggcaatttgagaacatccagacaaatccttccagcagaatcaatgtntggatgataaattggagtgagaaatcggatctgaggaggttcaaatgggtacctttcaagaatgattactgttagcttaaaaacacccttctcataaggtgtggttgctccaactaatatttgagctcgcaagtcatccatttggtcttatcttggcaacatgtgatggccgggggtggtctgtggcaacatgtgcactatctc

SEQ ID NO: 846 - DNA, 541 bp, Homo sapiens
  Genbank Accession No. AI990483
agagaagaaaacaccatctttaatcaacccgcctgcacagaaaccaggagagcactcccctccttgcaaggtcccagtgaaaagagaacctggtccccttgcaaaaaccatcttataaaaacaaaaggcttcaaagcaccagtggctacacccgttgagtagaaaggggcttgggggagagttggggtgagagaggtgagggctggaggcagggctggcccagtgaagggcagtagcttgcatttgggatggtggggtggggttgccagccttgctcaggatattttggccttagagagtagggaatgatagattggagggtagtgggagaggagcggaatggtcaccacagacaggctcaggtgtgcaaaccatctgcaccatctgggtgccccccagttcctccatgtctcctgccctcctttctaacccagggccatgcctctttcacagatgaaatgctgagacctgatcctctctctatggacgcaccaggcagtgcgtgggatgcagcgtcctcaggagtgtctgtggagggagg

SEQ ID NO: 847 - DNA, 591 bp, Homo sapiens
  Genbank Accession No. AI990642
  misc_feature (1)..(591): n = a or c or g or t
tttaaattgaaaggaaacttttattgagtcatgttttcaaagcaatctagtttttaaaaaagttgaagacaagacagaaaaaagaacatgacacctaagagaatcagacaggacagacagacgggagcaggggggcggggacagcggctccgtggaggtcagatcttctccatcttggagatgaggtcgtcgcagatcctggtcagctcctcgttctctttagtctggaggaggaagatgagttgcggggcttctccctgcttggagggagcagcaggcccaagggccttctagaaggtgctgccagacggccccttgagctgggcttcccgcacccaccttctgctccactgtcttctccagcgactggatgcgcatctgctccttcctcaggctggcctggagggccaacgcttccgcctgggccttgctccggacctgggcgatctcctcgtttgccctggaggggtaggggcggggcagangctgagctggggcccatgtgctcagattctccctccagggtggggcctcgcccagcactcacagctgcagcttctcctccgcgtgagccttcagggcttggtacct

SEQ ID NO: 848 - DNA, 3628 bp, Homo sapiens
  Genbank Accession No. AJ000388
gaattcggcacgagatagttttcaggttaagaaagccagaatctttgttcagccacactgactgaacagacttttagtggggttacctggctaacagcagcagcggcaacggcagcagcagcagcagcagcagcagcagcagcagcagggctcctgggataactcaggcatagttcaacactatgggtcctcctctgaagctcttcaaaaaccagaaataccaggaactgaagcaggaatgcatcaaagacagcagacttttctgtgatccaacatttctgcctgagaatgattctcttttctacttccgactgcttcctggaaaggtggtgtggaaacgtccccaggacatctgtgatgacccccatctgattgtgggcaacattagcaaccaccagctgacccaagggagactggggcacaagccaatggtttctgcattttcctgtttggctgttcaggagtctcattggacaaagacaattcccaaccataaggaacaggaatgggaccctcaaaaaacagaaaaatacgctgggatatttcactttcgtttctggcattttggagaatggactgaagtggtgattgatgacttgttgcccaccattaacggagatctggtcttctctttctccacttccatgaatgagttttggaatgctctgctggaaaaagcttatgcaaagctgctaggctgttatgaggccctggatggtttgaccatcactgatattattgtggacttcacgggcacattggctgaaactgttgacatgcagaaaggaagatacactgagcttgttgaggagaagtacaagctattcggagaactgtacaaaacatttaccaaaggtggtctgatctgctgttccattgagtctcccaatcaggaggagcaagaagttgaaactgattggggtctgctgaagggccatacctataccatgactgatattcgcaaaattcgtcttggagagagacttgtggaagtcttcagtgctgagaaggtgtatatggttcgcctgagaaaccccttgggaagacaggaatggagtggcccctggagtgaaatttctgaagagtggcagcaactgactgcatcagatcgcaagaacctggggcttgttatgtctgatgatggagagttttggatgagcttggaggacttttgccgcaactttcacaaactgaatgtctgccgcaatgtgaacaaccctatttttggccgaaaggagctggaatcggtgttgggatgctggactgtggatgatgatcccctgatgaaccgctcaggaggctgctataacaaccgtgataccttcctgcagaatccccagtacatcttcactgtgcctgaggatgggcacaaggtcattatgtcactgcagcagaaggacctgcgcacttaccgccgaatgggaagacctgacaattacatcattggctttgagctcttcaaggtggagatgaaccgcaaattccgcctccaccacctctacatccaggagcgtgctgggacttccacctatattgacacccgcacagtgtttctgagcaagtacctgaagaagggcaactatgtgcttgtcccaaccatgttccagcatggtcgcaccagcgagtttctcctgagaatcttctctgaagtgcctgtccagctcagggaactgactctggacatgcccaaaatgtcctgctggaacctggctcgtggctacccgaaagtagttactcagatcactgttcacagtgctgaggacctggagaagaagtatgccaatgaaactgtaaacccatatttggtcatcaaatgtggaaaggaggaagtccgttctcctgtccagaagaatacagttcatgccatttttgacacccaggccattttctacagaaggaccactgacattcctattatagtacaggtctggaacagccgaaaattctgtgatcagttcttggggcaggttactctggatgctgaccccagcgactgccgtgatctgaagtctctgtacctgcgtaagaagggtggtccaactgccaaagtcaagcaaggccacatcagcttcaaggttatttccagcgatgatctcactgagctctaaatctgcaatcccagagaatcctgacaaagcgtgccacccttttattttccgtcaggtgccaggtcttagttaagattcacaatctttagaaagaatgagattcacaataattaactcttcctctcttctgataaattccccatacctcccaatccaagtagcatctgtagctacataacctatatacctccagcagctggacatggggagcgacagtcctatctagacatcatacacatttgccaagaaaggatctctggggcttccgggggtgagattcaagcaggacaataacaagaggctggacaccctacagatgtctttgatgttttcagttgtttgatatatctcccctgtagggcatgttgaggaaggaggagggctgatcaaggccaagctggtctagcctgacatcctagctcctgactgaacactatagacttcccagcagcattttcacccagcagccagagccggctttaagtccccaacccttacagacaccactgccaccaccaccaaccacgaccaccaccaccaccaccactcaccaccatcatcacctccggaaagtgtagtcctgccctaaccctaaccccaagtcaccccccacagtaaattttaccttcatgttgagaaagcttcctggtgcttaatcaagagctggagttcaatgagtcctagacagtgagaggggcctgagcttcagctcaatggaagcctgctgtgtgctcacaagacggaaaagtggaagaagctgcagtgggagacaaagcctcggtcccccacccatccacacacacctacactcacacacgcgcacatgggcgcgcaacggaactaccatttcaggcagtcagtgggcaagaggaaagataagtaagtaccatacacaccttaaaagatgaggagaattcatccagacatattacagccagtttggggcccctgacttgcaatgtgaaacctcttcgcttgctgctaggtttacaaacaagcccattgttcctgtgcctcctaatattcatttgttactgaaggaccccatctggggacttgagactttggtcccagcccagacgcctcagactggtctcaaagtcaagcaaggcttcacatcagctgcaagtgttagtttgccagcgcatgatctcactgagcttctacagaatctgcaatcccagagtcaatcatgacgaaatgtacgtcccaccatcttaacctatcaactttctgcccctccttcaaggcccagtataaatgccacctcctccatgaagccttccctaattccaccccaaacccccaccttcaacaatatttcaacgcttctgcaatgatgaaaaagaaacatagttgtagtacttagcctacctagaccagcaagcattcatttttagctcgctcattttttaccatgttttccagtctgtttaacttctgcagtgccttcactacactgccttacataaaccaaatcacaataaagttcatattcagtacaattaaaaaaaaaaaaa

SEQ ID NO: 849 - DNA, 2565 bp, Homo sapiens
  Genbank Accession No. AJ001183
cgactgagccccagactggaggagaggtccgaggaggtgggcgttggactctttgcgaggaccccggcggctggcccgggggaggcggccgaagcggcggcggcggcggccgggggcgacatggcggaggagcaggatctatcggaggtggagctgagccccgtgggctcggaggagccccgctgcctgtccccggggagcgcgccctcgctagggcccgacggcggcggcggcggatcgggcctgcgagccagcccggggccaggcgagctgggcaaggtcaagaaggagcagcaggacggcgaggcggacgatgacaagttccccgtgtgcatccgcgaggccgtcagccaggtgctcagcggctacgactggacgctggtgcccatgcccgtgcgcgtcaacggcgccagcaaaagcaagccgcacgtcaagcggcccatgaacgccttcatggtgtgggctcaggcagcgcgcagaaagctcgcggaccagtacccgcacctgcacaacgctgagctcagcaagacgctgggcaagctctggaggctgctgaacgaaagtgacaagcgccccttcatcgaggaggctgagcggctccgtatgcagcacaagaaagaccacccggactacaagtaccagcccaggcggcggaagaacgggaaggccgcccagggcgaggcggagtgccccggtggggaggccgagcaaggtgggaccgccgccatccaggcccactacaagagcgcccacttggaccaccggcacccaggagagggctcccccatgtcagatgggaaccccgagcacccctcaggccagagccatggcccacccacccctccaaccaccccgaagacagaactgcagtcgggcaaggcagacccgaagcgggacgggcgttccatgggggagggcgggaagcctcacatcgacttcggcaacgtggacattggtgagatcagccacgaggtaatgtccaacatggagacctttgatgtggctgagttggaccagtacctgccgcccaatgggcacccaggccatgtgagcagctactcagcagccggctatgggctgggcagtgccctggccgtggccagtggacactccgcctggatctccaagccaccaggcgtggctctgcccacggtctcaccacctggtgtggatgccaaagcccaggtgaagacagagaccgcggggccccaggggcccccacactacaccgaccagccatccacctcacagatcgcctacacctccctcagcctgccccactatggctcagccttcccctccatctcccgcccccagtttgactactctgaccatcagccctcaggaccctattatggccactcgggccaggcctctggcctctactcggccttctcctatatggggccctcgcagcggcccctctacacggccatctctgaccccagcccctcagggccccagtcccacagccccacacactgggagcagccagtatatacgacactgtcccggccctaaagggggccctgtcgccaccaccccccgcccagcccctgcccccagcctgtgtgccctgttccttgcccacctcaggcctggtggtggcagtggaggaggctgaggaggctgaagaggctgacaggtcggggggctttctgtctggctcactgccctgatgacccacccgccccatccaggctccagcagcaaagccccaggagaacaggctggacagaggagaaggaggttgactgttgcacccacactgaaagatgaggggctgcaccttcccccaggaatgaccctctatcccaggacctgagaagggcctgctcaccctcctcggggaggggaagcaccagggttggtggcatcggaggccttaccactcctatgactcctgttttctctctcacagatagtgagggtctgacatgcccatgccacctatgccacagtgcctaagggctaggccacccagagactgtgcccggagctggccgtgtctcccactcaggggctgagagtagctttgaggagcctcattggggagtggggggttcgagggacttagtggagttctcatcccttcaatgccccctccctttctgaaggcaggaaggagttggcacagaggccccctgatccaattctgtgccaataacctcattctttgtctgagaaacagcccccagtcctcctccactacaacctccatgaccttgagacgcatcccaggaggtgacgaggcaggggctccaggaaaggaatcagagacaattcacagagcctccctccctgggctccttgccagctccctcttcccttactaggctctatggcccctgctcagtcagccccactccctgggcttcccagagagtgacagctgctcaggccctaacccttggctccaggagacacagggcccagcacccaggttgctgtcggcaggctgaagacactagaatcctgacctgtacattctgcccttgcttctcaccccttgcctcccagtggtatttgaataaagtatgtagctataaaaaaaaaaaaaaaaaa

SEQ ID NO: 850 - DNA, 70665 bp, Homo sapiens
  Genbank Accession No. AL021786
cagggttcgtatactactcctcagtataatctcaattttaaagggcaatagtattgtcttcgtgttctatgaaatctggaaagtgttggcgcttgcagatctgtcctgacttgtcttgttctctatatagttttaacttctgtgttcaaagtggagatataaaaagtcctttgagttaaatgagaatccatgtagtaaaagttgattgtacacacaatttgaaatgttaatgtgcttatccagctttttattatggaaactttcaatattaaatcctgcagtaaaactagcttttgtgtgttatacattttagagctcaaaagtaacaccctcttgcattgttgaggttttgattaaatgacagaggtcaaatatgtaattgttctcctgcttagtttgtaggttaaacatggtcagattttttgggaggtctaattagaggccagtagttaaatatagccacacagtaatcctttttttttttttcttcaccgccaagcatttcatgacttgtagatagattcagttaatatgcaagcaatacttctgccaggattgtgggtgcgatgaggaataagcaaaactgagcatttgcactttgattatactttgctgttacgttttggagaaaacttaacaggatccttacctggccactataggacactgataataatatttgacatattgtgttgtaatacattgatcagctagctcattagaggttgagcatgacaaatatgatgtcagacatagtgtacaatcacttcgaaagagttccaagagaaattagctatggtaattgatggctcacaccaacctaaagtccaataaatgtaaatgaaaacaaaaaatccttatttctaggatgtaacatcttatgaaattgaaattctaatacttaggccttgcttaataaacttcctgaattattgaaagaataaatgaaattacagtgcaaactgttcttctcatgtctcagtagcaagaaaaaataaatttatttctcttagaatttcaaattaagctattatgtgacttatgagcaagttactttatctttatgaaactcattttagtcatctaaaatataattttaagtctccagttctagattattgtacagtaattccaaatcaaaatttatagttctatctttgtagtgctaatcttagtttaggtttttttttttaataaaaataattaaaagttcctgaaaattactgggacacagaaaagccttcaaggtttatagagtactaattagtggagggtttgaacttaaataaatttagttaagaaaatgggaatctcaaatttctttgaccttcaaagaaaaatatttttggaaaaataaacatttaacaaatgattgtcctttcatcttctgcattaacttgaaatctatgcatttgttttcaccaaatgaatttaaggttagttagctctgataaacattgcagtagttgtcctgaaaaagagctaatgacctaaaagactaaaacaattcgatttatatacacgtttgaatgatttactctttaatgatcagggcctagatttgcttacttcatttattcagtccttgagtaacaatgctgcttaggatgtattgtgacatacaaaaatgggattagaaagattggagtccactgccctgggaagggcacaatcagttgcttgtttgctttggatctttcttgtttcaatcccgaagcaaaatattgatttaacaaaatattacagtcactgttaccacacagacaacttttgtgtctagctatcgcaaatgctacacttcaaaatcaagtgtttcacccaggacgtggaaaatatttcattcatgcaatacacagttatagaatattgatcgatattaagaaacttttatttctcgattaaattaggaacattaaatttatatctctcccttcaatattttaatttctaaaatatggggaaaatggcatataccttatagaactcctacctttaaaacctaattttcaaaaatcagctttttgaaaaatcagttaataaattaatcaaaggatactaattctcttttaagttgacaaactgatttggaaaaaataatgaagaaacagaaccatatcccagaaagttagtgattatatcagtgtactagttcaaaaagtaattacttctgtttactgagtataatttctagagatcggctctactgcattgtgcctattgttaatactatattatacatttaaaaatgtgttaagagtcaatgtcgtgttaagtgttcttagcacagtaaaaaagaatatgacattgcataaataaatggtaattttaatttgattcttgatgcatgtattttgaaataatttcatatcgatatttgggtttagaaatgccaaatggaaggttaatataatcagagacattttttaacatctattagattcagaaattgtcttgaaataaattcagactacaattaaaatgagttaacatttaaaaaaatatcttgggtttcaagggaggtaaattgtacacaaaatcaactatgtgtctaaaagtacaatctggttttgtttttggttttgctttttaataaataggagctccgagttgccacccaggaaaaagagggctcctctgggagatgtatgcttactctcttaggcctttcattcatcttggcaggacttattgttggtggagcctgcatttacaagtacttcatgcccaaggtaataataataattataattattatactttggattactacttgctagacatttagtagcaacttaaaaaattctgtagtggtgactagagaaaagaagatttagggaaagttttcaagttgcctttcagttcataaaattgatttgtcttcattgtgataactgtagtcaacaagcctcggcttaacacatagtacaatgaattgatatgagtgtgaaaagccattcaaatatcatgatagtgattattagaaggttgtaattttccctttttgtcttttagagcaccatttaccgtggagagatgtgcttttttgattctgaggatcctgcaaattcccttcgtggaggagagcctaacttcctgcctgtgactgaggaggctgacattcgtgaggatgacaacattgcaatcattgatgtgcctgtccccagtttctctgatagtgaccctgcagcaattattcatgactttgaaaaggtgggcttctcattcttataaatattccaggattttttttctctctctctctcttttttacttcattggcaggtattaaattcattcatgaatgcacatgtttttgaggcaaagccttttcattcttttgttgttgaatacacattagttgattttgaaaggatgtagccgcttaatctaatggtagttggaaaattcgcaatgttaatgccttctgtgtcttacctgacttttttcccctacctaacagggaatgactgcttacctggacttgttgctggggaactgctatctgatgcccctcaatacttctattgttatgcctccaaaaaatctggtagagctctttggcaaactggcggtatgtattttggaagtcaaatttttatataagcatttccaagtaattttacttccttgttttttaaaaaaataatgaatttgtccaaaacattttattttattgaaataattttgaaataaaaaacgttgtgaacctaaaactgctctagaaaataaagattattttttacagtcattatctggtgtaggaaaggatttaaatagtgtccttaagaatttgggcaaatgacatgaacagacattttccaaaagaagacatacatgcgggccacaaacatgaacaaaagctgagcatcactgaacattagataaatgcaaatcaaaatcacaatgagataccatctcacaccagtcagagtggctattactaaaaagtcaaaaaataacagatgctggtgaggttgtggagaaaaaggaatgcttatacaccattggtgttggtgtaaattagttcagccattatggaagatgctgtggtgatttctcagacctagacagaaatactattagacccagcaatcgcattactgggtgtatgcccaaagaaatataaataattttattataaagacacatgcacaagtatgttcattgcagcaatatttataatagcaaagacatggtatcagcctaaatgtccatcaatgatagagtggataaagaaaatgcgatacatacacaccatggtatagtatgcagccaaaaaaaaaaaaaaatcacaaaaaaaaaacaagatcatgtcctttgcagagacatggataaagctggaggccattatccttacaaactaacacagcaacagaaaaccaaataccgtatgttctcacttaagtgagagccaaatgcaaagaacacatggtcacatagaggggaataacacacactggggcctttcagagggtggaagatgggggaagggacaggatcaggaaaaataaccagtaggtactaggcttaatacctgggtgattaaataatctctacaacaaaccccatgacacaactttacttaagtaacaaacttgcacttttactcctgaacttcaaagttaaaaaggaaaaagaatttctcatttcaatctttgcttttgatttttagagtggcagatatctgcctcaaacttatgtggttcgagaagacctagttgctgtggaggaaattcgtgatgttagtaaccttggcatctttatttaccaactttgcaataacagaaagtccttccgccttcgtcgcagagacctcttgctgggtaagtaactaatgtattccttccttcaccctgtgttacacagtggaagaaagtggaggtagaatacaggaaaaagtggggaacaagtctggatatattttcatttccacaaaaatttcaaaagccactttttttgcacatttccttacaggtttcaacaaacgtgccattgataaatgctggaagattagacacttccccaacgaatttattgttgagaccaagatctgtcaagagtaagaggcaacagatagagtgtccttggtaataagaagtcagagatttacaatatgactttaacattaaggtttatgggatactcaagatatttactcatgcatttactctattgcttatgctttaaaaaaaggaaaaaaaaaaactactaaccactgcaagctcttgtcaaattttagtttaattggcattgcttgttttttgaaactgaaattacatgagtttcattttttctttgaatttatagggtttagatttctgaaagcagcatgaatatatcacctaacatcctgacaataaattccatccgttgttttttttgtttgtttgttttttcttttcctttaagtaagctctttattcatcttatggtggagcaattttaaaatttgaaatattttaaattgtttttgaactttttgtgtaaaatatatcagatctcaacattgttggtttcttttgtttttcattttgtacaactttcttgaatttagaaattacatctttgcagttctgttaggtgctctgtaattaacctgacttatatgtgaacaattttcatgagacagtcatttttaactaatgcagtgattctttctcactactatctgtattgtggaatgcacaaaattgtgtaggtgctgaatgctgtaaggagtttaggttgtatgaattctacaaccctataataaattttactctatacaaccactgtttcttttatttcatcacttgagatatagtcaatgtgaataattaatattacttatttagcttttggtgtacctgtaacagatctaaaattatgaggccaactttgcccccattcccacctacacatatttatatgttatattttcatatttcactcccttttgacagtatattaattactcttttataaacatcccataattggcttatcatgtaaattcaactatttatttagaggcttcaggcgcatagcactttaaaatcttttgaagtgttttctttctcatcaaattaaacaactatacacagctataatggatcactaaggactaaccttggataagatgttgatagcttttaagaacttcaaatgctgtgatcattactcatgtatctaagagtctaaacttcataccaaggggacatgagtactataaactatttcccttgtattaggtgaaaaatcgctcctgatatcccttattacctgctgggataccaactattggtcaatttcagtagccaaaactacttagtcgaatccatacccttaaatactaccattattttttaatgaaataaattaaacatttaactttaagaacttagaaataaagcgatggcacaaacaataaagcatacagaaagcaaaatgcagtatttagaagataataacagtaattgataaattcaagaactggctcttcataaagaagaatatgtaaaaagagtctgataaaatttaacacccattgcttgtcttaaaatatgcatagaaatttaggaaaaaggaaatacactatttccaaatttatcttaaataacatcacaactaatggtacaacacaggaaaggatgttggctattgaagctattcagtgttgttccagacattctggccaatgcaataatatgtaaaacaaataaaaatataacttttaaaggagggttaaaattatgtttattactagatagatttttacatataagatattagtggaataatcaaaactttaaaaattaatgagaagattcagtatgatagaaacaaaagccaattactttcctttataccacaaacaaccaattaaagggaaataccaccaggtaaaaaatattctcacaatagcaacagggacatcaagtagcaccaacaagaaatttatggaattattataaagaaagccatgaaacttaattaagagatataaaataaaagttaagtaaatagagaagagaggaagaacattacaaatagacaaattcttccacaattaaatttcttgttttaagcaatttcaattaaaatcccaaaataattggttttggaacttggcaaaattatttgaagtttcatctggaagcataaataagttagaatcactaaagaaaaaaatgaaaaaagagtaattggagacaggatgtcttacatgaacaactattaaaccacagccaaattcacaatagttttaaaggtaactttcacacaagatagaaaattatgatgccaagaaagagattctagtgtgtaaaagaacagtatcctaacagaagctccatgcaacgagatacattgtatatccaattttgcccccaaatctggctaaatgaaaacaaacaaacaaaaaagtcctagtggccatcgtataaaatagcataagggtaacagccctccaaatgcagcatctcctaaatttttactactaatgaatatttcttaaaagagaaaaacctttaaaaatgctaaaagtataactgaatgataacctgatgctggcatccatgagtaatagatatctgacagagactagctctctgattgtttttccagaaactcagagccccaaatctgtcaaaaaaccaaacaacgcatattctcactcataggtgggaattgaacaatgagaacacatggacacaggaaggggaacatcacactctggggactgctgtggggtggggggaggggggagggataggtttaggagatatacctaatgctaaatgacgagttaatgggtgcagcacaccagcatggcacatgtatacatatgtaactaacctgcacattgtgcacatgtaccctaaaacttaaaagtataataataattaaaaaaaaagaaaactcaaaaaaaaaagaaaagtgggcagtcatagatctaagaattgtgtgaatcatagttttaggtatcataacttgtgccacgtttctattctatccattcactcaccctcacatgattattcattctctcatttattgtttgtcaggaatgggaatggatagagttctgagcaaaacagacatagaccctgcccctattaagcatatagtctcctggggagtaaaaggctttttcaaataattcagctactttattataaagaagaattatagaagcctatgagagtttataatggcaggggtgagaatcctggactaataattaagtctcaacttactgtgaaatttgagcagaaagctgaagtatgagtagtataaatcaggtaaatttcaggcagaagtcattggaagctaagtccctgaggcaggaaggaatgtggttgttggagaaagtgaaataaaaagggcctgagcacattgagtaaagagaattatatgaaaataagttggaaaattagggagagtccagatcatgtaggacactataggctatgtaaaaacacacaaacaaaaaacttttgtctttgtacttaaagtaataagagacatttgaagggttttaagtagggtcatgaatgagagccgattggtatttttaaaagattactttgactgcaatgagaaaaaatatattacagggagacaaaagggaaaacagtaagaccaattaggccattccagtagtctaagcaaaaaatgataatggattggacaaggaaagtgtcaatgataaaataaagaagtagaggaaataaagatatatttttggcataaaagtgatggaaaataattataaattgcatatttaagaagaagtatatcaaggagttttgtcattgatgagtcccaggtgtctggcttacatccttggatgaaaaataatatgacttgctcctgcagatctcaaaatttacttgggttaaacagtgggaaattgatgtttgatgtgccattcagagtttcagcagtaaacagatgtcaccctcaaacagaacaatgaagagaggttaataaagtgacaaagtataaagtgtaaaatgagttaataaataataagtcccaatgaagctcactaggtttaacaacactggtgaggcctcatgacctctacccttgaagaggcaagggggaaaactagctataggtgaagactttccctgacaggagctgcagtctttggtagagggacacaaccactttgtcctttaatctcctgttggtgtctcccattgaccaaactcaactagaagccagaagaataggagtgccttgatgcaatccacaaaggacagcccccttgatacaagcagaaaagatgaatgaagagtggctccggagaacctgactgagagtatccagcatagcccactttacttttctccacagcatccactctttttgtttatccagataaagtattcatgtccccagcatagagaacacataaattctcattagctaccatccaatttcaagatattgtcaattctacatttctacctaaaactaaaatgttagccaccaccattactctttatataaggcaacttgagtgggaagagggaaaaagaagtcaagtaaagcatggctgcttcagttcttgatttctagctgttaaggggtcagaagttggtcatcataatcttcttcttacacaacccgttccttatcttcctatgccatctgcagcatcttggctggatgggttttgttttacctagtggaataattcagatatttttcactgcagggtttgagttgttggcaatcttgtatttgtagcagtttttcattgaaaatggccattcggccaggaaggagacaaggcacctgagtgaatcttttgagttccagtaatagttttccttggttccactgtttagtagcagcacaattttcccttgataattataattaatcacctcagcaagtacagcaattatttctctgcctgttggtttgtggagagccacagatggctaagaatcagtctcaggatccaatttaatggaaccatgactccattttctggtggaagtactccacccctgagcagtaggacttgcacacccactgtattaatctgttattgcactgctataaagaaatacctgatactgggtaatttataaagaaaataggcttaattggctcacagttctgcaggcttaacagaaagcatggcttggaggcctcaagaagcttacaatcatagcagaaggcaaagagaaagctagcacatcttaccatggcagagcaggagagtggggaagagagagaaagagagagagagaggaagtgccacacacctttaaaccatcagatctcaagagaacacattcaccatcatgaaaacaacaaggggattatctgcccccataatccaatcacctcccaccaggcccctcctccaattagacatgagatttggtcagggaaacaaatccaaaccatagcattccactcctggcccctcgcaaatctcatatcctttgcacctttcaaaaccaatcatgctttcccaacaatcccccaaagtcttaactaattccagtattaactcaaaagtctaagtccaaagtcttatctgagacaaggcaagtcctttccacctatgagcctgtaaaattcaaagcaagttagttacttccaagatacaatggggatacattcattgtgtaaatgctcccattctaaaagggagaaattggccaaaacaaaggggttacaggtcccatgcaattctgaaacccagcagggcagtgattaagtcttaaaactccaaaataatctcctttgactccatgtctcacatataggacatgctgaagcaagggttaggctccctatgacatgagcatctccacccctgtggctcttcagggtgcagcccccatggcagttttcatgggatggcattgagtgcctgtgacttttccaggctcacgttgcaagctgttggtgaatctaccattctggagtctgtaggacagtggccctcttctcacagtcccactaggcagtgctgcagggggtactctgtgtggggcatccagccccatatttctcctctgcaatgccctagtagaggttctccatgagtgctacgcccctgcagcagacttctgcctggacatccaggcatttccatacatcctctgaaatctaggcaaagatttccaatgcacaactcttgtcttctgcacacctgcaggctcaacactacatggaagccactaaggcttgtagcttgcaccctctgaagtaaagacctgagctgtaccttggccacttctagccacagctggagctggagcagctggaatgcagagcaccatgtctgaggctgcacagagcaagggtccctgggcccagtccatgaagccattttccctgctaggtctctgagactgtgatgggagggactgccatcaaggtctctgacatgccctggagacattttcctcattgtcttggctattaacattcagctcctctttacttatgcaaatttctgcagccagcttgaatttctccccagaaaatgggtttttcttttttatcacatagtcaggctgcaaattttccaaattcttatgctctgcttaccttttaaacataaattccaatttcagaccatctctttcttcaagcatataagtgtacacttttagaaacagccaggtcatattttgaatgctttgctgcttagaaatttattctgtctgacatcctaaatcatctctctcaaattcaaagttctacagatctctagggcagaggcaaaatgctgccagtctctttgctaaagtatagcaagagtgacctttattccagttcccaataagttcctcatctctttctgagactgcctcagcctggacttcattgtcaatatcgctatcagcattttggtaacaaccattcaagaagtctctaggaagttccaaactttcccacatcttcctatcttctgagcccaccaaactgttccaacttctgaccattacccagttccaaagttgcctccacatatttaggtatctttgtagcaatgcccccactcttctggtaccaattttctgtattggttcattttcatactgctataaagaagtacctgagactgggtaatttatgaagaaaagagttttaatggactaacagttccacaggcttaacaggatgcatggctgtgaggcctcattttgaaaagtgaagtggaagataacatatcttactatggcagagcagaagagagtcagagtgagcggggaagtgccacacacttttaaaccatcagatctcatgagaactcactctctatcatgagaacagcagggggaaatccgctcccatgatccaatcacttcccaacaggcccctccaccaattagacgtgagatttggtcaaggacacaaatccgagccgcataaggcactaaaatcaagattcagggaacaggaagcaaaagtttcttcagagcattgttagatagatataatattattatataataataataataataataatataaaagggacactctcacctctctttatgggggaaaggacaaaattgactgctgctttaaagtttagcctgaagggtagcacctcaatcttacaggttgctgtctctcaactgaaataatatttgaatctttttaggatatcattcctcatgttatgttttaaggatccaatacatgttatcactaattttatgccatgcagtttaggttgcatgtcagtttgtgtcccatggtcaaggaatttagtctctactgggcctgttagaaagatgggaatagtatttcaatttggaaatagttatcataagaagagagcatgactttactacgtaagcttaagagttggtgctataattatcctagagcatttttgtcttttgtagaaacttccaatgctattgtgtctgatggtttataaggcacaaatggcagagcaacttgcactggtgcctagatctactgtaagtgttttcttcctctagaccaaacccaagacttacagccttatgggttacctggtaaatgagttggagcagcaaacctaagtgtggtatgtgttgcctccaacatcccagaagttctaccaagcattttatctcttttttcacgacagacagcacaagagacaatgaatgtttctcaccttagaaagaatatactgacaggcccagaccactggactcctggaaaacatcaaacttatgacaggacttctaaatatgcatgtatcttactaaggcactaataatgcttgtttctttctgctcatcaattctacttagcataatgtcataaatacaatagaacagtatgatgttttgttggggatacaaacataattcgtgttacttttggccaaattgtaagagagaagacaaaattatgtctccctaatataggaaggtaaggcagactacttcttcttctttttttttttgctgacagaaatggaagaggaagaagttatgtgttatgtaaatagctacatattaactgccaagagcagtgtttacttgctttaataaagacaccacattcagaactaaagctggaatttgctttatgctctaattacgattgcaataatccatagtcattttccaaaacacatctggcctttgcccctagccaaattaaattaaatggcaatatagaaaaaataacactttttggattgtggaggcatctgatgatagtaataacctctgcaattcctttctcttttggtttacagtcttggcagggagtaaggagagttgtagtgactcttgcaatagccctaactcatggatcatgaaaccagtatggggattcttccagttgctgaatatgtattttcccactacacattttgaaaattgggaataaaatataacattaatctgcagtctaaattccgcctcagggagatagacttgggctatgacttattttatcttctgatgttgatagccccacactctgatttataaactatggtggaattccaggtgtccaagattcagtaccagctcagggctaatgtctaatagcttcaaaaatggacatttcttcttcatccagtcatccagataaatggatttggattcctctggacaaagattgggggaatactaaatgtatgcaactgtgtctccatttctgggttattcataaaaggcatccaacctccctcaagcaagggtctccaattctgtggacattcttgggcatggaaactgagtacaaggctgcaaaccccactgtggtcactcaagttaggtttctgtacaatagacttcaaagttttctgtctaaatgtgccaaacagcaacttaatagatcgcttaatttatgcctaacaatgtcctgattagttagccattatcataaactcttgaaagacaaaatacgttgctttgaccctttgtttcatttaatatgtcaattgctttcaccttgtgcctaggcttgaccagtttagtactcattgttctcaatgttgtggagagggatatgataaaaagttgaacacaatatgtccatttcaacagttgcatctcactgtcttcagaatcctttccatataatgtaacagggaagttttggcatttcactaactataaaccactgctatatacaagtttcaatttaaccaatctcgcagagagttatcaccattctttggtgctcataccaacatatttcatcttaaaatctaaatgaatgcatgcacattatttaacttggcttaatcaatttttatattccttcctccatggtctgtccttataatacgttctcatgtatattcccaatatttttgatggtgcatattgtcaaagccaaacactcttttatcaaaagaacatgccaattttcctcatggggagtataagctctatatatgatatggtttggatttgtgtcccacccaaatctcatctcaaattgtaatccccacgtgtcaagggaaggacctgtaatccccagggactgtggggaagtgacttaattattgcagcagtttctcccatgctgttcccatgatagcgagtgagttctcaggagatctgatggtattataagcatctggcatttcccctgctcgcacttctctgtcctgctgcattgtgaagaagttgcctgctttccctttgccttctgccgtgattgtaagtttcctgaggcttctctacccatgcaaaactgggagtcaattaaacctctttcctttataaattactcagtctcaggtatttctttatagcagtgcaaaaatggactaatagaatatataaaccaaaagtgttacatcttatttaatccatgtccatttgtgcttctgtaaaattaccagcctggataattcagaagaaaacagaaatttatgtttatattacagtttgggaggctggaaagtccaagtccaaggtgtcggcaggttgggttaaggccagattttcacttccaagaaggagtcttgttgctgcatcatctggaggggaagaatgctgtgttcttacatggcagaaggaatggaaggagcacagacactactcaagctctttcataaatttgctaatcccattcatgagggctctgccagcactatgtaatcaacccctaaaggccccacctcttaatactattgcatttctaattacatttcaacacatgaattttgggggagcattcatatcatagcaacccacttggaagagtataagagaaaacttgaatatgtttaaataaattggcagaaagggaccattagagaggcacaggtttaagatacaagagacatgaggacattagtggagctaggtttttgaggaagtggtaggaaaaagaataaaaaagcacaactaaaaagataatcctggccaggtacggtggcttatgcctgtaatccccgcactttgggaggccaagacgggcagatcacctgaggtcaggagttcgagaccagcctgggcaacacggtgaaatgctgcctctactaaaaatagaacaattagcggggaatggtggtgggcgcctgtaatcccagctacgcgggaggctaagacaggagaatcgcttgaacccgggaggcggaggttgcagatcgcaccactgcattgggcggcagagcaagactccacctaaaaaaaaaaaaaaaagaccaggcgcagtggctcacgcctgtaatcccataatcccagcactttgggaggccgagacggggatcatgaggtcacgagatcaagaccatcctgcctaacacggtgaaaccccgtctctcctaaaaaaaatacaagaaattaggtgggcatggtggtggacacctgtagtcccagctacttgggaggctgaggcaggagaatggcatgaacccgggaggtggagcttgcagagagccgagatcgtgccactgcactccagcctaggtgacagagcaagactccgtctcaaaaaaaaataaaaaaaaaaaatccttagatagaaagagggagttaagtctcttccattccattgaactagaaaaaataggaaattattaacaaaatttgacttttatattcgaaagttcaggataatttatttgatatctcaaagtccaggacggtaaggttgaaaatgtgatcatgagagtagatgactgaagtggagaggaagtaaaggtgatggtgatgagaaaatcaagaaccaagaggccagtgcattggatgtgttgctcgcatgaatattgatgtaactgagaataacgaaagtacctgagatagaaaactaaatgaagcaggtgtcaagtttttcaataaatgatggaggagtaggagtgactaggtaagtaaattttgacaacaaagactggagagtaaattcagagtcaatgagcacccaaagaaaaagagtttttatgagatgagtaatgatagtctgaaagtatctctgatgagattttaggatcgtagccattaaaatcaagaacaagagggggattaatgctactattcaatgaagtactaattgaaatctttttctatgcagaaaatccagaagaattgactgccaaactattaaaaccaatataataaccgagtaggatgttttatgaaacatgtcaaattaattttaaaatctgcatagaatggtatttataaatagccaaaataattttgaaataagattacaaagaaatttgtcttgttctataaatatttattgctgaagttttgtaattaaaacaaaatgtttgggacttggaaaggaatagagagtccagattttatatatatatatatatatacacacacacacactcttacatatacatacacacatatatatatacacatatagatatatttatgcatgtgtatgcatgtctacattataatatggcattagtaactaatataagcataacacaaaagaagcatgtgatgtcggggaatgatgagctaattaatgaatatttttggaaaaattttctgtacatttggaaagtaaggttagattcctttgttgttgttgttgttttattgttttccaactttaatttttatttttaaaattgtattgtatttcaatagttttcgggcaacaggtggtttttggttacatggataagttctttagtggtgatttctgagattttagtgcacctttcacccaagtagtgtacacgatacccagtgtatagtcttttatccttcaccctactcccaccctttcccctgagtcctcaaagtccattatatcattcttatgcctttgtgtcctcattgcttagctcccacttataagtgagaacatatgatatttggttttctattcctgagttatttcacttagaataatggtctccaactccatccagattgctgcaaatgccactattttgttcctttttatggcagagtagtattccatatatataccaaattatctttatccgttcgttggttgatgggcattaggctggttccatatttttgcaattgcgaattgtgctgctataaacatgcgagtgcaagtgtctttttcatataatgacttcttttcctctgggcatatagccattagtgggattgctgaatccaagggtagttctacttttagttttttaaggaatctccatactgtttcccatagaggttgtactagtttatattccaagcagcagtgtaaatgtgttcccttttcacaacatccataacaacatccattatttttttcattttttaattatggccattcttgcagaaataagatgacatctcactgtggttttaatttgcatctccctgataattattgatgttgagcatttttcatatgtttgttggccatttgtatatcttctttacagaattgtctattcatgttctttacccaattttaattatttatttattttttccctgtacatttgtttgagctccttttagattctggatattagtcctttgttggatgcataatttgcaaatattttctctcattctgtgggttacctgttaaccctgctgattattccttctgctgtgcagaagttttttagtttaattcagtcccatctatttatttttacttttgttgcatttgctttagggctgttggtcataaactctctgcctaagccaatgtctaaaagtttttctgatgttatcttacagaatttttatagtttcatgtctttgttccatcttgagttgatttttctataaggtgagaggtgagaatccagtttcattcttctacatgtggcttgccaattatccccagcaccttttgttgaacaggggtcctttccccactgtatgtttttgtatactttgtgaaatatcagttgacagtatttggctttatttctgggttctctattctgttctattggcctactttcctatttttataccagtaccatgctgttttgttgactatagccttgtgttatggtttgaagtaggataatttgatgcccccagatttgttctttttgcttagtcttgatttgtctatgcagggtctttttttggctccatataaattttagaattgtttatttcaagatctgtgaagaatgatgatggtacttagatgtgaattgcattgaatctgtagattgcttttggccatatggtaatttccacaatattcattctacccatccatgagcatgtaatgtgtttccatttgtttgtggcattgataatttcttgcaggagtgttttgcagtttttcttgtagagatatttcacctcattggttaagtattttatatttttgcagctgttgtaaaagggattgtgttcttgatttgattctcagcttggtcgctgttggtgtatatcagtgctactgatttgtgtacattgattttgtatccgaaaactttactgaattcattaatcagatctaggagctttttggatgagtctttagggttttctaagtatatggtcgtatcattagtggacagcgacacgttgacttcctctttacctatttgaatgccctttatttctttctcttgctctgactaagacttccagtactatattgaataaaagtggtggaagtgggcatccttgtcttgttccattctgaggaagaatgctttcaaatcttccctgttcagtataatgctgcctgtgtgtttgtcatagatggctttattatcttgagatatatcttttctatgccaatattcctgagggttttaatcataaggcgatgctgtattttgtcaactgttttttatgcaactatttatatggtcatactatgtttgtttttaatgctgtttatatgatgtatcacatttattgacttgcatgtggtaaagcatccctgaatcactggtatgaaacccacttaatcattctggattatctttttgatatgctgttggattcagttagctagtattttgttgaggatttttgcatctatgttcatcagggatattgttctgtagttttctttttctcttatgtcctttcctgatttttggtattggagtgatactggcttcatacaatgatttatgggagattctctctttctctacctttgaaatagtttcagtaacattagtatcaattttcctttgaaaatctgatagaattcagctgtgatttcatctggtcctggacttttgttgttcttgttggcaattttaaaattacagtttcaatctcactacttttcgttggtctattcagagtttctatttcttcctgatttaatctaggaagactgtatatttccaggaatttatccatctcctccagattttctagtttgtgcatgtaaaggtgctcacagtaaccttgaatgatcttttgtacttctgtcatatcagttataatatctcccattttttttctagttgagcttatttggatcttctctcttttcttggttaatctaatggtctatcacttttgtttatcttttcaaaacaccagtttttcctttcttttttgcattattttttgtttcaatttcatttagttctgctctgatttatgttattccttttattctgcttgatttgggtatggtttatttgtgtttctctagttccttgaggtgtgagcttagattgtctatttgtgctctttcagacttttttttttttttaactgattctcactctgttgcccaggctggagtgcagtggtgctatcttggctcactgcaagctctgcctcccagattcactccattctcctgcctcagcctcctgagtagctgggacaacaggtgcccgccaccatgccttgctaattttttttatatttttagtagagatggggtttcaccatgttagcaaggatggtcttgatctcctgaccttgtgatctgcccgccttggcctcccaaagtgctggaattacaggcgtgagacaccacgcccagctgctctttcagactttttaatgtaggcatttaatgctatgaattttcctcttagcacatcttttgctatatcccagagattttcatagattgtgtcactattatcattcagttcaaatctttttttaatttccatcttgatttcgttattgtcgcaaagatcattcaagagcagattatttaaattccccgtatttgtatagttttgagggctccttttggggttaaattctacttttatttcactgtggtctgagaggatacttgatatacttccaatcctattaaatttattgggacttgttttgtgacctatcacatggtcacatggtctcctatcttggagaatgttccatgtgtcaagcaaaagaatgtatattgtgttgttgttggggtctgtaaatatctgttaagtacatttgttacaaggtatagtttaagtccattttttctttgtcgactttctgtcttgaagacctgtctagtgctgccagtggagtattgaagttctgcactatttttatgttgccatctagctcagttcttaggtgtagtagtgatggttttataaatttgtgagctccagtgttaggttaatatatatttaggattgtgacattttcctgttggactaatccttttaaaattatataatgacccactttgtctttcttttttttttaactgctgttgctctgaagtctgttttgactggtataagactagctactcttgcttgctttggtttccatttgcgtggaatattttttccaccctttaccttaagtttatatgaatcctcatgtgtcaggtgagtctcttgaaagcagaagatacttggttggtggatttttatccattctgccattctgcatcttctaagtggagcatttagatcatttacgtttaatgttagtattgagatttgaggtactgttcaattaatcatgctagttgcttccttaaaatctttttccccattgtgttattgttttataggccttgtgatgtttatgctttaaggaggttctattttggtgtattttgaggttttcttccaaaatttggaactcctcttactacttcttgtagtgttggcttggtagtggtgaattatctcagtatttgtttgtctgaaaaggaatttttaactctccttcatttatgaagcttagttttgctggataaaaaaaaatttgtggctgacaattattttgtttcaggaggctaaagatgggaccccaatacattctgccttgtaaggtttctgcttagaaataggtttttctttatagattaactgatgcttttgttccatagctcttaagatttttttcctgtgtcttgactttagacaacctgattcctatgtgcctacatgataatctttttttgatgaatttcccagttgttttcttaagcttcttgtatttgaatgtctagatctctagcaaggctggggaagctttccagttgtttcctcaaataagttttccaaacttttagatttctctttattcttgggaataccaattatttttaggtttggccatttaacataatttcaaatttcttggtggcttttgttcatttactcaattttttaaatttgtctttgtctgattgggttaattcaaaaaccttgtcttcgagccttgaagttttttcttctacttgttttagtctattgctgacactttctagtgcattttgtgtttctctaagcgtatttttcatttccaaaaattatgattgtttctgcgttgtgatatctgtttctctggataatttttcatccatatcctgtattgttttttaaattcattcaagttggttttcacctttctctggtatctcctggagtggcttaataatcaactttctgaattctttatctgacaattcagaaatttcttcttggttttgattcattgctggggagctaatgtgatcttctgtagttgttgtataaccctgttttgtcatattaccagaattacttttctggttcctttttacttgagtagactatttcagtggaaaatctggaactcaaggcctgctgttcagattcttttgtcccacagggtgatcccttgatgtggtgctctcctctttcccttagggatggggcttcctgagagctgaactgcagtgatagttattgctcttctggctccagccacccagctgggctaccaggctctgggctgctgctggggaatgtctgcaaagagtcctgtgatgtgattcacttaaagtctcccagctgtggataccagcatctattctggtggaggtggcagtgggatgaagtaggctctgtgagagtctttggttgtagatatgcttagtgtgctggctttctcaaatgctggttatgcaagcagtgaagttgtcacttggacagagtcaggacctctggttagcctaaatgttgcaggcggtgaaattagttgttgttttatccttccttgtagctgggtcattttgtcatgagttgctgtaatggcctgagttggttggcaggaagtggtgttttcaagagagcaccagctgcagtagtagtagggggttctaagcaggtgatgggcagggccataaagctcccaagagtttctgtcttttgtgtttggatactagggtgggtagagaaatatcgtcacgtgggggcaggtttaggtgggtctgggctcacactctccttgtgcagggctagtggcagccactgtgggggatggggtgtggttcttgggccaatggggttatatttcagaggggattatggctgtctctactgtgccatatatttcatcagaaaagtggggtatagcctgtagcaagaggcttcactcagctcccacacagctggtgaggccggtcttgctcccacagtgccctgctcagaagttaccccaggctgtacacttctccactgggaaagcaagcacaattatcaggccttgctcctccctctctgcccacactgtcagtggcagcttctgtgtttgtatatacagcagttcttgtttgccccccaaattagttttttgcctgtctcatgaaatttgcagtggcatgccacttctctcaaagaatctgtgaattcttttggttttcctgttacattcctgaagtagttcttgaagcaaaagttcatggtgtgagtctccacatgttgttctgtccatccaagtaagagctgcacattagccctgtctcttatatgccatcttcctccctatctctactgtaatttttacacttttttgggggcttgggaacagagcatcatttagtctaaggttgattttggccactataaagacaaactctgagtactctatctgaaacgtaaagtttgattctaagattctaagcttacacccttagcaaagcattcttgcaggggcattggtaacataatgtaaaaaaaagtaagtatagccaggctcagtgactcacacctgtaattccagcttaattggaggccaaggcaggaggagagcttgagcctaggagatcaaggctgcagtaagccgtgattgtgccactgaactccagcctgggagacagagtaagaccctgtgtccataaaagtaaaaataatgcaagaaaaataaattttgaaaaatatgatacaaccttagaatataggacaaattccttaagcaaaaaaaagtaaaaatcaactaggaaaaatgtaataattatatatttccctatatcaaagttttttaaaaaccatatttctcaacaacatgttgactggaggaagacatttataatgtatataactgatgagacatccacattttaaaaaattttctacatatatgtaagaaaaatgaataaagaataagaaaatacaagtcacaaaaatgtaagaggaaatatatctggtaaataaaaccatgaaacaatgctcaatctctttagtactcaaggagatacaaattaaacaaggtgaaatataggcactatttgtgactcagtaatttttctacttggttttatctctggaaaccacttatatacatggtcaaagaatactacactgaatgcttattggagcattgtttgtaggagtgaaaaactagaacaaagcagatgcttataaatactaatatttgacacttactgcatgattcaaatgtggcaggtattattctaaaggctttacatgttctactatatttaccctccacatcaatcatatgaagaaagtattattatttgcattttatttataaaaatgagtcacaggaatattaagtaatttgttccaagttcccaagattagagtctgataatccgatgacagagctagtgttcttaaccactgtgatactatatagtgaattggctaaatagtctattatatgaactatgaattataaatggcagttaaaaataaggttcagtaaagtatagatccctaatatgtagatttaatgagatagatcttagtataaatatctccaacatatattgtagaatgaagaagacattgcagaaaaatatccagtataataacatttatttttaaattccctgtatatagtctatattttctacatatacatagaaatgtgtgaagagcacatgggaaaatatctaaaaggacgagggaggaggcagtggacagaaattagtagtgggtgcatttatccaaaaaatttcagctttatctgtaagtattaattgtataaattaatattttaaaggagagttaaagacaggtttacagtccagtgttttaagatgcttggaggtcatcattaggccctaagaacaagtaaactgaaaaatcagaaaactcaacaactctttgtagatccataagaagtgaggtcacagggaaaaccactgctccccaaactggagagacagacagaaaaatacataaaagaaatcaaagcaggaacgtctgtggaaacaagtgccagggtaagaaaacttaaactgtaaatgatgaattgtttgggctcaatgtggactagtgtttgagataaaaactccaggtaagcccagtcatcaggaagctcccacatttttgtgagttttacttcctggatttattataccagacctcacagtgaatatcaaagaaaattatcctcatggttccaggaagaaaggaaccattttgaaatacatacgtgaattttctttttattaaaaagctctttcctcaggagaaactaacctgctggggttttatcagagtctaacaaacctggggaaaggaaaagatgcaactccagccctctcttccatgttggaaaagaaaaaatgtttaatgtagaccacaatagtcatcataagtgtggtagcagtatactgagaagcacttgcaatgttcacaatccagaggtacaagctcactaaaaatctgagacctaatcgtaaaactgtagaactatttctcacccctatacacactatattaccatattgctaaagacctatttagagcagttctttttacccaggacatcatgactggatatcaagaaaagaacttggaaccaacccaaaagcccatcaatgatagactggataaagaaaatctggcacttatacaccatggagtactatgcagccataaaaaggatgagttcatgtccttttcagggacatggatgaagctggaaaacatgattctcagcaaactaacacaggaatgaaaaaccaaacaccgtatgttctcactcataagtgggagttcaacaattagaacatgtggacacagggaggggaacatcatacaatggggcctttcagggggtgggggtctaggggagggatagcattaggagaaatacctaatgtagatgacgggatgatgggtgcagcaaaccaccatggcacgtgtataactatataacaaacctgcatgttcttcacatacatgtacccaagaacttaaagtataataaaaaaagaaaataattacaaatcatactaaaagaaaaaaatacagtttgaagagacacatcaagtgtcagaattagattcagttatggcaaggatgttggaatggtcaggtaagaaatttaaatatattatgaccagtatgctaaaggctctaatgggtaaagtagacagcatgcaagaatagaaggacattataattagaaatgaaattataagaaagaagcaaaaagtaatgttagagatttaaaaaactaaaacaaatgaagaatgcctcaatgtgcttactagggaattgcacacagctaagccaagaatatttgagcctatctcaatagaaacttcaaaaacataagagaaaaaaagaaaaaaagaaaaaccaaaacagaacaaaatattcaagaactgtgggataactacaagaggtataacgtttgtgtaatggctgtattagaagtagaggaagaaacagaagtaatatttgaaacaatgaagactgagaattttctgcaaattaatgtcaaacactaaaccacagatcctggaagctgagaaaataccaagtaggatatagtaaaaaaaagaaaaagaaaacaaaaagaattcaaacctaggcatgctatactcaaaccacaaaaatcagagataaagaaaaattcctgaaaagagttagatgggaaaaaaccttccttacactaaagataaaaattacatcacacttgtcctcagaaatcatgcaagtaagaggagaatgcagttacatatttaaagtgttgagagaaaagaactactaacctataattctgtatctagcaaaatcatctttcaaaagtgaaggagaaacaaagactaacccaaaagaacaagcattaaggaggtttcctgccagtagacctgttttgcaagaaatgttaaaaattctttatagagaaaaataaatgtcagaaatgaaaagaataaaagggcaccagataaaggataaatgagggtaaaataaaaacttatttttcttatttttagggtctgcctgagtccaatatatttcttattcttaactgatctaacagatagtttatttaaaataataagaggaacaatatatgtcattatgtatttgtttttacatatatatgatgtacatatgcatgtatacttacgtataagtgaaatgaataacaacaattatacaaaaaatggaatggaggaatcaggttatttttgttattataaggaacccatactacccatgagtagtatagtgttatttaaaagtgaacttagagtagttgtaaatgtatttttgcaaatactagggcaaccactttaaaaagtgtaaaaaaagtgtgactaatatgctgagaaaggagaaaaaatgaaatcatataaaatgctcaatgaaaaccacagaaggcataaaaagtataatagaaaaattaaaagatcaaaggtaaagaaatagaaaatagtaacagataatgtagacattaatacacctataccaattataatttggaacatcagtgttctaaatgcaccaattaaaagccagagattatcagagtttgtaataaaagaaaacccaagtatgttctctacaggaaaactgctttgaatatgaaaacaatggtagcactaattgaaagaaagtgaaagtaaggagtgacatcagcaatatagcggaataggagtttccatagaaacaacaattttggtaaagactcacaggtaagaatatttcgtgaaatccctggagtatagctgaggttccagcactctagtggacaaaatccccaagagtagatgcattgaagaaggtaaaaagagaagtttcactttacttgcatcacccctatccaaaggcaacacaatttggtgctgagagatcccctgcgcctatgatttctcccacagaaggaaggaaaattaaagtgagcatccagctttcacagtcttgtaggaggcggcccaggaggcctactgttgtctcaccccatgcagcccagaacacttatgggattgacactgccaaatcatcaggggaagcttgaagcagagggaaagggagggagcacacagtaaccagtgcatatttctcaacagctagccagtgattctgctaaatggttcatagactctaccaagatacccactcaagaagcctacagaacaactcacttgaagacattccaactacctggcacatgccccagcaccccttcacccattgttggcacccttcacatccctgtaaacagcatgcacaagctctcagagaaggcacacaagtttgaaaaacagatgcagatcttagcagctggctcaactttgctggtttcagagaaggctccacagcctcaaacacttcagggcactgccataggaaaacgtataatagaggttctcagcaccaggcctggatttgtggggtcaagaaaaagcatacaattgcaagactgcttcccaaagagagaacaagagaagtggagcaaggaaatgtatataaatttctgaaagtccccctaaattcctagaagggcttcctggtgaaggatcttctgtcccaaagccagtcagtaaagactggagaatgtgactacttattcagatagaagacagcaatgcaaatcttcaaggaatataaataacccagaaaatacagactgtccctggaacaacagcaacaaaaagaataaaaaggtgtgaatgaagcctgctgaacttaagagaaactatctcacacacacacacacacacacacacacacacacacacgtctcagaatgatcagagaaaaaaaaggaacagaaatcttaataagtaatgacaaaacttccaaaatccagaaggaagaaagaatatccaagtctatgaacatcaacaaacttgaagtagtttgagcatgaaatggtcttcactgagaaacagtataatcgaattatcaaaataaaacacagaactcgaatgctgcaagagaaaagcaacttgtcacatacaaaaaaacctccacaaggctatcagtttatttgtcactagaaatcttgcagacaaggagaaagtgaaatgatatattcaaattgctgaaaggaacacctcccaaataacaatattatgcctggcaaatctacccttcagaaataaaagaacaataaagacagaagctgagggaattcagaccactagacctacaatacaaaaaaaaaaaatctaaagagagatattcaagttgaaaaaagtgatgctaatcagcaacatgtaaacatatgaagatataatacgcagaagaatgaaactggacccctacatatcaccatatacaataatgaactcaagatgaattaaggacttaaacagaaaacttcaagctataaaaatcatagaagaggagctagaaaatattcttctggacctcagccttgggaaataatttatgaccaagtcctaaaaagcaattccaacaaaaacaaaaattgacaagtgagacctaatcaacctaaagagcttttgtacggcaaaggaacagagtgagcagacaacctacagaatgagagaaaatatttgcaaactatatatctaacaaaggactaatattcagaatatgtagggtacttaaatcaacaggaaaaaaactctaataaaaaaagaaagaagttcacaaagacatgaacagacacttctcaaaagaagacatacaagcagccaacacatatataaaaatgctcaacatcactaatcattggagaaacgcaaatccaaaccacaatgagatactatctcacactagtcagaatggccattattaaaaattcaaaaaatagcagatgctggtgaggctgcaaagaaaagggaaaacttacacactgttggtgagaatgtaaattagttcagccactagggagagcagttgggatatttctcaacgaactaaaaatagaatcaccattgatccccccaatctcattactgtgtatatatgcaaaggaaaaaaaatcattctaatgaaaagacacattaacttctatgttcattgcagtactattcacaatagcaatgacataggattaacctagatgcccaccaacagagaattggataaataaaatatggtttgcttacaccacgaaatactatgcagccataaaaccagatgacatcatgtcttttgcagtaacgtgggtgtagctggagtccattattctaagcaaataaatacagaaacaaaaaaaaatcacatattacatgttcttatttataagtgagagctaaatcttgggtacacatgggcataaacctggggaaaatagacactgcagactccaaaagaagagaaggaggggagcaagggctgaaaaatatgctatttatgcttactagctgtgtaacaggatcagtagaagcctaaacctcagcatcaaacagtatatgcttttaacaatcctacacatgtaacccctgaaactaaaataaaaatggattcaattgctttaatttttagctcccacaaataaataagaacatgtgaatgttatctttccgtgctgggcctatttcacttagtataatgacctccagtttcatccaagttgctgcaaatgacatcatctccaagatctcattcttttttatggttgaatagtactccgttgtgtatatataccacatttctttatccattcagctgttgatggagacttaggctgcttccaaatgactattgtgagaagtgctgccataaacatgggagtgtggctatctctttgataaactgatttcctttcttttgggtctatacctaacagtggtattgctggatcatacggtagctcttttttattttttaatgttttatttatttgttcatttatatttatatttttatggatacacagtaggtgtatatatttagtgggcacatgagaggttttggtacaggcatgcagtgcataataatcacatcatggaaaatgggatataaataccctcaagcatttattctttgtgttacaatcaatccaattatactccttcagttattttaaaatatacctttaatttattattgactatagtcaccctgttgtggtatcaaacaccaggtcttatttattctttctaatttttttttatactcattaaccatcccacatgaagagcactccattttgtgtaagcaccacattttctttactaatttatcttttgatggacatttaagttgcttccaaatcttggctattgttaacagtgctgcaacaaacatggaagtgcagatatctctttgatataccgatttttcttttgggtatatacccaacagtggtactgctgaatcatatggtagttctctttttagttttttgagaaatctccaaattgttctacacagtgtttgtactaatttatgttcctatcagcagtgtatataagggttccatttttgccacttcctggttaccagagactgagaaaagtagtggagcggctgacatggggaaggaggtatggttaaatggtacaaaaatagttgaaaagaatgaagaagatctagtattttatagtacgatgggatgatttgagtcaacagtaattcaattgtacatttcaaaataactaaaagtatataattgaattgtttgtaacacaaaggataaatgcttgaggtaatggaaaccttgtttaccctgatgtgattgttagacattgtatgcctgtagcaaaatatcccatatattctatacatacatacatacatacatatatatatatatatacccactatgtactcatatgaattaaaatttgaaaattaaaatataaaatataataaaaatgaaaattaaaaatattaattgacagaaaacataggaacatataaaacttgctggtaaaggtaagtatgtagtcaaatgtagattactctaatactgtaatggtggtatataaatcactttaaacagtataaaagttaaaaggcaaaagtatcaaaaagagccaaagctacaataagttattaatgtataaacaataaagtggtagaaagttccacatcaataacaaaatattgggaagggtgacaaaagtactaatttttgtaaacaaaattaacatgccatcaggttaaaacagaacgtcataaccataagatgctttatgcaagtctcatgttaatcacaaacaaaatacctatatttgattcacaaaagaaaaagataggttgggcgcggtggctcaagcctgtaatcccagaactttgggaggctgaggcaggtggatcacgaggttaggagatcgagaccatcctggatacatggtgaaaccccgtctctactaaaaataaaaaaaaattagttgggcgtggtggcgggcgcctgtagtcccagctactcgggaggctgagacaggagaatggcgtgaacccaggaggcagagcttgcagtgagccaagatggcaccactgcactccagcctgggcgacagagcgagactccatctcaaaaaataaaaaaagaaaaaaaaaagataaaggaatcaaagcatgccactacaaatcagaagttaaaacagcagatgaagaaggaaacaaagcactgcaaaacagtcagtaaaaaattaacaaaatggtattaataagtcctatgtatcaacaatgaccttaagtgtaaattggttaaattatccaatcaatacatgtacattggctgaatggataaaagaaaaacaaaggcaagattcaaccatgtgttgtctacaagaaactcactttagctttaatgacacacataggctaaaagtgatgggataaaatacaatatcccatgaaaattgcaaccaaaagagagcaggggtgactatatttataaaagacaaaatagatttatgtcaaaaactgtcagaagaaaacaagaatgtcattatacaaagataaaggggtcaagtcataaacagaatattacaattgtaactataaatgcattcaatattggagcaactaaatatataaagcaaatattaacagaactgaagggagaaatacatagcaatacaattactgtaggggactttaataccccctttcaataatggatagatcactcaaaagtaaatcaataaggaaacagagaatttgaacatcagtataaaatgatggatctaacagatatatacagacccttctgtccaacagtagcagaatacaaatccttcccaagtatatatggaacattttccagattagaccatatgttaggccacaatacaagtgctaacaaatgtaaaaatgttaaaatcatatcaagtatcatttctaaccacaatgatatgaaattagaaatcaataacaaaaggaaaactgggaaactcgcaaatatgtgtaaattaagcaacatactaacaaacaaccaatgagttaaataaaaatttcaagtgtaataaaataatatcttggtgaagcaggagaatagggaaaatgaggcaggagaatagtgaagggaattaaaagttggataaagggcagaagaagtaaaagcagagggcagaagcaaggtgaaggggcaggtgagcaagaagcaaggtaagaggcagaagttaagcagccaaaacaaaaagtaagataaagcagcgagcaaggatcccatggccaatagtatccagaccaaacaagtaaggggcaactcttcagggatagtcatgtgcattaaaaatatccttagcatgaccctgtgtaataatcagctcattaaagctcacacctatggacttcatatcatgcgtgtacttaaacttatgggatggaggcaatgtgcaagcacacaggggttaaataactaagcaacacacctatcagtcaaaaaggcagacactggctagtcagcccttggggagagaggaaaaagaaaacacataaaaagacccaaagtacaccaaactaaggctgatctaatctacagaggtcagtctgttctccccctctgagagtgtaatattgtgcctaataaatttttgctgctttgctttgctatctgtgtatatcttatccaattgtttgtttgagacgccaagagcttggaactatgaggcactatctggtaacattgggacaagttaaaatgaaaatacaacataccaagcttatgggatgcagcaaaaggagttatcagcaggaagttttcagtaataaatggctacattaagaaaatagcaaaatctgaaattaaaaaaaaatcactttacaatgccaggaaataaaaaaaagagcaacaagtacacacagtaagcataaggaaataataaagataaaacaagcaaattaaataaagaccagaaaaaacaatagaaaatattcacaaaattaagacttgttttttaaaaagataaagcaatagaattttagctagagtaaaaagggagagaaaagatataaacaaataaatttataaatgaaagaggaagcattacaactgataccagagaaatatgaaggatcatgagactactatgaacaattacatatcaacaaattggataacctagaagtggatgaatcctagacataaaatctagcatgcctgaaccacgaagacatagaaaatctgaatagacagataacatgaaaggagattaaatcagttatcaaaaatctcctggcaaaaaagtttagagctagatgaattcactggggaattctatccaaactttaagaatttttgaaattctaaaactcttctaaaactttgagaggatgtaaccctttcaaattcattctatgaggccaactttaccctgataccaaaagcagacactataagaagaaaattacaatccactattcctgatgtacatagataagaaaatcctcaacaaaatactacaaactgacttcagcaggactttataagcattatataccttgaaaaagtgaatttataccttggaggcaagaatgtttaacacatgcaaataataaatatgatactgagacagacaggtcaggaagctccctgacaaaattccggctggcctgtgcattgggaggagggcacactggggtggagacacagaagttttcattctttgaagcggggagaagcctcgcccctcctgttcctgtgtggaacttgggattaaactgcaaggcaggaagctgaccagcagggactctcctttgcagagggtacctgtttccctttacttcccttttcacccaataaaaccctgccttattcacccttcaaattgcctatgagcctaatcttttgtggccttgtgacaaggaccccgtctttagctgaactaaggagaagtcccacaacaatacactacataaacagaataaaaaataaaaatcatatgatcatctcaatagatgtagaaaaaaatttgtgagctcaacatcctttcatggtaaaatctctcaaacaattaagtatataagaaatgtacctcaacataataaaggccatatattacccacctgcagctaatacagacaatatgaaaaattgaagactgttcctctaagatcacgaacaaggcaaggattctcacttcaccacttctaattaacataatactagaagtcctagccagtgtaattaggtaacaaaaaaagtcttacatataggaatggaaaaaagtaaaactgtcttatttgcatataatgagatattacattttgaaaaccctaaaaacttctcaaaaaagtgtcagaactaatacatcaactcagtaatgtttcaggacacataatcagttacaattatctgttacatttctatatactaacactttatcagaaaaaaatatagggaaacaatcttatctaaaatctcatatctgttacatttctatataataacagcttatcagaaaaaaatagggaaacaatcttacctaaaatctcatctaaaatatcatcaaaaaagataaaaatagttagatataaatttaataaagaaaatgaaaaaggtgtacactgaaaactacaaaacaattgaaagacaataaagtagacacaaataaattgaaatatatttttatgttatggaattgaagaggtaaaattgctaaaatgttcatactacacaaagcaatcaacagattcaagtcaatccctatcaaaattccagtggccttttccacagaaatagaataaattatccaaaaatttatatgaaaccagaaaagaccctgtaagcaaagcaattttgagtaagtagaacaaagtaaagacaacagacttcttgatttcaattatattacgtatttatagtaattaaaacagtactggcactggcataaaacagacatgtagaccaatagaacagaatgaagaaccctgaaataaatcctcacatataaagtcagctaacttttgacaaggatgcaaagaatacaagtgggcaaagaatggtcacttcaataaatggtgttggaaatactggttatctacatgaaagcaggtaaaatttgactcttatcttccctatacacaaaatcaatgcataatgaattcgtgacccaacaataaggcatgaatctgtaaaagtcctagaaaaaaaaagtggaaaaattcctagaaagtgattttgataataattttcgtatatgacataaaaagcaaaagcaagagatgtaaaaataaacaagtgggaatacatcaaactaaaaagcttctgcagagctaagaaacaacaaaataaaaaggcaacctatggaatgggagaaaatatttgcaaaccatgcatctgataaggggttaatatccaaaatatccaagaaactcataccgtggaacagctaaagtacacccaattttaataatgggcaaaggacctaagtagacattcttccaaagaaaacatacaaatgcccaagtatatgaatagttgctcaatatcactaataacccaggaaatacaaatcaaaaccacaataaggtattacctcacatctgtttgaatggctattataaaatgccaaaggataaattattctgcaggtgtggagaaaggagaaaacttgtacactcttggtgaaaatgtaaatatatacatcaattatcaaaaacagtatgcaggtttctcaacaaattagaactagaaatactatatgatctagcaatcccacttctgggtgtacatatccaaaataatttaaaccacaatttcaaagaagtatgtgcactcctatgttcactgcagcattatttacaatagccaagatatgagaaacatgtaaatgcccatcaatggacaaataaataagaaattgtgacataatatatatatgaataatattcgaccttaaaaaagaagcaaattctgtcatttgttgcaaaatgaatggacctagaaggcattacgttaagtaaaataaactagacacagaaaaaaaaactgtattcttttacttatttgtggtatgtaaattagtcaaactcacagaaacagagaatagaatggtggttactaaagactgaggtaagggagaaatggaaaggtgatagtttgagggtcaaaatttcagttatgcataataaattggttctggagatctactatatagcatagggaccatatctaacaatactctattgtacacttaaaattgctaaaagaaatagatcttatattaaatgttcttaacattaaaaaacaagaaaaaaggtattaataacaaacgggacaggcggaaactttggtagatgatgtatatgtttagagtgttgatggtggtgatcgttacacaggtatacacctagtcccaatttataaatatgtatatattaaatgtgtaaagcttttaatatgtcaatcataccttaataaggtggttttaaaaaaatgaaagtgggaatggctttattaatttcaggcagagcagacttaagagcaagggacattatcagtgagcagaaaaaatgaaataatacaaattaaagcaaaaatcaatgcattcagaaacaggaaatcaatagggaaaataaacagatcaaaaggtggttctttgaaaagattaatacaaatgaaaaacctctagccaggctaattaagaaagaaaaagagagtgctaatgcagggcctagacttctagtgcctctgaggcagaaccaaagtagcatgcacccagagaaattcctgttcctgccccgcctgtctgcctgtgacctgtgtacctgttatgaaactctagggccagctgatttttgggcttgcaggatggttttgaacagaaataatacttgtttactgtaggagccctagtttttatttttctgtcctatgaatgctgtgaaatgatttattcctttcaggccaggaatctcacaggcatatatacctctaggttaggattatcctaactcactaaagatgtcaggatattggggctgagaggagtttgggctgttaaaaataacagtgtttgtctctcaaactggcgaccaagaaatagctaagacaattttggtgcattacctatctctgcaaagaatggaaaatttggcataccattaattacaacctccagtcatatcaaacaaaactaccctaaaagaaaaactaatgggcactcttgaaaaagtttaaatatcagaagattaaaaagactttagaatttgggaaaaaaaggaaaacagaaaacactaattactaatatctaaaatgaaaagcagacatcactataaatcctatggagattaaaatgatactaagcaattttttttcaactttcattttaggttcaaggggtacatgtgcaagttagttacaagagtatattgcatgaccctgaggtttggggtattaatgatcccatcacccagatagtgagcatagtacccagtaggtagtttttaaaaaaattctcaggcatcccaatccctctgtcatctagtagtccccagtgtctattgttcccaactgtttatctacgtgtactcaatgtttagctcccacttttacgtgagaacatgtagaattcagttttcttttcctgcattaattttcttaggataatgacttccaactacatctgcgtttctgcaaaaaaacatgatttcattctgttttatggctgtgtaatattccatggtgatacatactacagtttctttctttctttttttttttttgtaggtgggctaaggtttatttacttacataacatttaaaaataattcattgggtggctggcaagatggccaaataggaacagctccagtctgcagctcccagcaagatcaatgcagaaggcggctgatttctgcattttcatctgaggtacctggctcatctaattgggactggttaggcagtaggtgcagcccatggagggcaagcagaagcagggtggagtgttgcctcacatgggaagcacaaggggttggggaactcccttccctagcgaagggaagccgtgaggaactgtgctatgaggaagagtgcattccagcgcacatactatgcttttcccacagtctttacaaccctcagaccaggagattctctccggtgcctacacctccagggccctgggttgcaagcacaaaactaagcagtcatttgggcaggcaccgagctagctgcaggaggttttttgttttgttttgttttgtttttcataccccagtgacacttggaataccagaaaggcagaaccattcactcccctggaaacaggctgaagccagggagccaagtggtctagctcagtagatcccaccccacagagcccagcaagctaagatccactggcttgaaattctcaccgccagcacagcagcctgaagtcaacctaggatgctcgagcttggtggagggaggagcctccaccattactgaggcttgagtaggtggttttcccttcacagtgtaaacaaagccgctgggaggtttgaacagggtggagcccaacacagctcagcaaagccactgtagccagactgcctctctaggttcctcctctctgggcagggcatctctgaaagaaaggcagcattcccagtcaggggcttatagacaaaactcccatttccctgggacagagcacctgggggaaagggggggctgtgggtgcaacttcagcagacttaaacgttcctgcctcctggctctgaagagagcagtggatctctacattttctttccatttctggtcttcctaagcctccactagcttttgaagatccagttttctggctgcatgctgccttagctcttctagcttggtgttaatttttttttttttttttttttttttttgagacgttgtctcgctctgtcgcccaggctggagtgcagtggcgcgatctgggctcattgcaagctcagcctcccagattcacgccattctcctgcttcagcctcccgagtagctgggactacaggcgcctgccaccaccacgcccggctaattttttgtatttttagtagagaggggtttcaccgtgttaggcaggatggtctcaatctcctgacctcgtgatccgcccgccttggcctcccaaagtgctgggattacaggcgtgggccaccgcgcccagcagcgttcatttttttcattcacttgctctgtcaaaatgatcctctctaacatttgggctgtctgaccagctgcctcactcagaccacgacttttaattttttattctccatcagggattgtagattttctgatggttacacatttatagatccaggcagggtacctccatgggcttgtaggaaccagacttgtagctgttgtacctgttgctttagatgattaagttcaactatctggcgatcagtattaacaacaggtttgttcctggtttttcttgctctgtcagcatagcgaagggtatttagtttcctctagattggagccagcaggactcacacagcctattataagagtatggttattaccacttagagaaccttgaagcagtcgagccaacttggaatctccgtaggacacaaagtcaccctttttgtcttctccaagagcactgattacatttcccaagcatagaaggcctcggttaatattaataccctcttttagatgatccccttcagccttggttttcttctctctttctgatccagcgaggtctacaagatgtagcttggagcgaaagctgctattcttgtcacttttctttctctgctctatggagattgtaaagatggcatgagattgggatgactgggggttcatagctgtggaggccacagtcctaaagttgttgcgctgctccaaataggaaacagtatccaaggcaactaaaacagtctgctcagtgagtatcacaatctttatgctatagaatacacattcttttcctgagtacatggatcattctcaaggatagatcataaggtatgccacaaaacaaggcttaaaacattaaaaaaaaataaaataatatgaagtatcatctgtaatcacaaaggaataaaattagaaatcaataaccttaggatcttcccatatatttatttgagctttctcacaagaagggcatagaagatccaaaatttcttcactgtaaatctttaagtaagacatgttcagagtaaattccaagtcactctttttatcaatttctttgaagagcagttgtattaccctaggaataaccccaactgttgattccttctctttctctgcagtgtatgcacctcccattgaatatgtgtttttccagagcaagtctgcccataggccaggaccgttgcattatatcatttaaatatgccttttatgagtggtgctactgctgtattgaagacttcttcctgttcactactggggtcaaacacaaaatcatagttcaaggatttatcagtaccaaccactacctgaggctccctgggcacgaaggaaaggcatatctggcagcagccctcgataatctctttggggaccagagggcaacaacacagcgccactcttataagaattcccttcacctcttccttcatgatcctatctcagcaccgcctcaaactcaatgtcttttcttggttctccccaggtctccccttactacagtttctttatccagttcactgttgatggggatctgggttgatttcatgtctttgttattgtgaatagtgctgcaataaacatatgagtacatgtgttttttggtagaaaaatatatattataaaggtgaccaggggcggtagctcacacctgtaatcccagtacattgggaggctgaggtgggaggatcccttgaacttgggagttcaagaccagtctggcccatatggtgaaaccctgcctttactaaaaacacaagaaaaattagccaggagtggtggcatacacctataatcccagctattcaggttgctgaggcaaaagaatcccttggacctgggaagaggggttgtagtgagctgagattgcaccactgcactccagccagggtgatgaagtgaggctctgtcgaaaaaagaaagagaaagaaagaaagaaagaaagaaagaaagaaagaaagaaagaaagaaagagagagggagagagagagagagaaagaaagaaagaaagaaagaaagaaagaaagaaagaaagaaagaaagaaagaaagaaagaaagaaagaatttatttttgaaaggaatatcttaaacagctctatgcacacaaagttgataatcttcatgaaatggacaaagttcttgaaagacacaatctgccatgtctcacaccaaaaaaattacataatctgaataggcttatatatattaaaggaattgagtaagttattaatgatattaatatttaacaataatagatacaatataagttttagggataagaaatacgatttaaccagaaataaaaaaaattgtttaaattataaagacaattgtgcaaaactcttaacccactctaacaatcagtgtccaaagaaaaagtaaatggcatactcaaagggtttaactgaaaaaagtttaatgaaaagattatttagaaacataaaagcagggtgatatattttatacatataccacattttgttttttccaataatcaactgatggaaatttgtgttgtttccacttgtgggatactatgtataatgctgccatgaaaatttttgtacaagttttgttgtggatatatgtttttatttcccttaggtagatactaggaatggaattgctgggtcatatggtagctttatgtttaacttttccaggaactgctagcctgtttctgaaaaggctgcaccttcccgttcatttttcaactctagcataactctgatagtcaagactgaaaaaatatgttgaagtttcttaaggcttgattctgggtctttccccatctcagcattggacccatcttacaaattctgaatttgaataaattgaggtcaatcttgcactttctgctaaaaaaataaaaataaaataaaaactaaataaaaaaactaaataaaaataaaaaacagcctcactactttcttattttgttcagtggttacttattcaacaagaaaaacactacttgatcagcaaaattgaataaatgattggaatgaaaaatacacagaagaaaaatcagacaaataaataataatccaataattgacgagatacaaattacagtagaaagtttttcacctgtcaattgataaatagcaagatacaatgccagtgaagatatagtaataatagctactatgttttgagtgtttaatataggccatgtgctttacatgcattatttcattatcttgggatactatataatatgggatactatgtacaatgtatcctattatcatattaggcagatacttttattaattccattttatagtacagaaaaatgtgccaaagtcatgaagctagtaattcatggtactgggatttgggtccagataatctgactcactcccctgggtgtctataattttctacctttaaaaatgagtgtttcatgttccattcgtgtatatctttccttcctgtctgtgcacatatatgagaagtggtctaacaaaataatacagaaaagcaacaatatgataggaaataaataagatcaatagaagaggtgggttgtcttctacatgcttttcttcagagaacatagaagaaccaaatcttatctaaaagaggactatgaagagccttcttgccctacagaattccagaccttgacattgcaggggaatgttaaaatacagccaggaccctgtggtggaggaaagaatggagtggaaaatagagacaaattaaactattggagctatgtgggaatctgtgtcaccattagaggctttttaaaatagtctttaaaaagatgcaacccactggagaaaatgaaaatctattttgtactacccagaggatttctactaaattcattagtatagaaaatttcaaatatatacaaagatagaaagatatgattagcctttatatgtatagccaccacccaatttttatcaatatatggccagtgctgattcatcaattgcccttcttcattttttatcctatccgcaaatacttaaatatataccttgaaataatacatattatttttgaaaacatagtattattatacacctaaaattatatttttaatttatcttttattttttagggaccaggtaagttaatactcatgtggtacatgagatattttgatacaggcatacaatgtgtaataatcaaatcaggataaatgaggtattaatcacctcaaccatttattttttatgttacaaacaatccaattttactcttttagttatttttaaaatgtacaaataaattattttttactaagtcaccctgttgtcctgacaaatactatcttatttattctttctatgtttttataccaaataccgatccccacttcctccctcatctcccactacacttcccagcatctggtaaccatccttctactctctatctgcatgagttcaattgttttgatttttagctctcaaaaataagtgagggtattactgagggatcctggcagatgggaggcaggactagattgcagcactagacagagttgcatgtggaggcttgcattgtgaagtttaattccagatcaactccaaaaacaaaccagcaatcctgggaggatcctctgaagtaagcagactgctcctgcaggacccaggagaaaccccaaatactgcgagtgccccaactgcggaagtgggaaagggagaccctcctctcccaaacacacccccgcactggaaaagctgaaggcctatttgcaggagaagtttctgactttatctggagctaagtcaagttgcagagccaagccgagtgaaatacaggggtagaagaagcagcagaaaggccctgggagctcgctgggtcttcaagcagtccattcctgcctgacaccacagggatccatcaggaggatggccagaggagcaggggtaaaactccaaagggagaaaaaattctctagctgaactgtgtaataatttgaacagggcgagaagcctcctggccagaactcgaaggagggtgggaatccaacatgcagacttcacagacatggggaagagctaaagcccttttccttcacagctgagaggcagaaaaacctcaggcaaatttttaagcccatctcaccctccgtctggaaacagactcagggctgttgggagaagcacagtgagagtgagaccagcccttcagtttgcctgggagctggatgaggcctgttactgccagctttcccccacttccctgacaaccagcatgactcagaagaggcagtcataatcctcctaggtacacaactccagtgaacttggaatctcatccccatcccctacagcagccatagcaagacccacccaaggagagtcttgagctcagacatgcctagcctgcccccacctgatggtccttccctatccaccctggtagcaaaagaaaaaaggcatttaatcttgggagttctagggccctgcccaccaccagtccctgtccacactactacaactgatgctttctggaaaaccccacctactgacaggaggccaaccagcacaaaaatagagcattaaactaccaaagctaaggaccctcatggagtccattgcaccctctgccacctccaccagaacaggaactggtatccatagctgagagacccatagatggttcacatcacaggactctgtgcagacaacccccagtaccagcccggagctgggtagacttgctgggtggctagacccagaagagagacaacaatcactgcagcttggctcacaggaagccacatccactggaaaagggggagagtactacatcaagggaacactctgtgagacaaaaattctgaacaatagccttcagtcctagaccttccctctgacagagcccacccaaatgagaaaaaaccagaaaaccaaccctagtaatatgacaaaacaaggctcttcaacaccccccaaaaatcacactagttcaccagccatggatccaaaccaagaagaaattcatgatttacctgaaaaagaattcaggaggttagttattaagctaatcagggaaggacaagagaaaggcaaagcccaatgcaaagaaatccaaaaaaaaggatacaagaaatgaagggagagatattcaaggaaacaggtagtttaaagaaaaaacaataaaaaatttgggaaactgcagacatacttttagaaatggaaaatgctctggaaagtctcagcaatagaattgaataaatagaagaaagaaattcagaacttgaagacaaggtctttgaattaactcaatccaacaaagacaaagaaaaaagaataagaaaatatgaactaagcctccaagaagtctgggattgtgttaaatgaccaaacctaagaataaacaatgtacctgaagaagtagacaattctaaaagcttggaaaacatatttgggggaataatcaaggaaaacttgcctggccttgctagagacctagacatgcaaatacaagaagcacaaagaacacctgggaaattcattgctaaaagatcttcaactacacacattttcctcaggttatccaaagttaagacaaaggaaagaatcttaagagctgtgagacagaagcaccaggtaacctataaagggtaacctattagattaacagcagatatctcagcagaaactctacaagctagaagggattgggccctatcttcaaccgcctcaagcaaaacaattatcagccaagaattttgtatccagtgaatctaagcatcatacatgaaggaaagatacagtcattttcagacaaacaaatgatctgagaatttgccattaccaagccaccactacaagaattgtgaaaaggagctctaaatcttgaaacaaatcctggaaacccatcaaaccagaacctctttaaagcataaatcacacaggacctataaaacaaaaatacaagttaaaaagaaaaaaaaaaaaaaaacgaataaaagtacacaggcaacaaagagcatgattaacgcaatggtacctcacatttcaatactaacattgaatgtaaatggcctaaatgctccacttaaaagacacagaagtgcagaatggataagaactcatgaaccaaatatctgctgccttcaggagacttatctaacacataagaactcacataaacttaaagaggtagaaaaaggcatttcatgcaaatggacaccaaaagtgagcggggggagctattcttatatcagataaaacaaactttaaagcaacaatatttaaaagagacaaagatggacattatataatggcaaaatgcccgtccgacaggaaaatatcagaatcctaaacatatatgcatctaacactggagatctcaaatgtttaaaacaattactaatagacttaagaaatgagatagacagcaacacaataatagtgggggacttcaatactccactgacagcattagacaggtcatcaagaaagaaaggcaacaaagaaacaatggatttaaactataacttggaacaaatggacttaacagatatatatatatatatatacataacatttcatccaaaaactgcagaatacacatgattcaatagcacatggaactttctccaagatagactatgtgatgggccataaaatgagccttaataaatttaagaaaattgaaattacatcaggcactctctcagaccacagtggaataaaactggaaatcaactcctaaaggaacctccaaaaccatgcaaatacatggaaattaaataacctgcttctgaatgaaatcaagatggaaaatttcaaaaatgaaatcaagatggaaattaaaaaattcttcaagctgaatgacactagtgacacaacctataaaaacctctgggatacagcgaaggcagtgctaatagtaaagttcatagccctaaaggcctacatcaaaaaatctgaaagagcacaatctaagatcacacccaaaggaactagaaaaacaagaacaacaaaccaaacccaaacccagcagaagaaaggaaataaccaagatcagagcagaactagatgaaatagaaacaaacaaacaaaaaatacaaaagataagtaaaacaaaaggctggttctttgaaaagataaataaaattgatagaccattagcaagattaaccaagaagagagaaaatccaagtaacctcattaagaaatgaaacaggagatattacaattgacaccactgaaatacaaaagatcattcaaggctagtatgaacacctttacacaaataaactggaaaacctagaagagatggatgaattcctggaaaaaatacaaccctcctaccttaaatcaggaagatttagataccctgataccctaaatagaccaataacaagcagtgagattgaaattgtaattaataaattaccaacaaaaatgtccaggagcagacagattcacagcagaattctaccagacagtcaaagaagaattggcaccaagtattttgacactattccacaagatagagaaagaaggaaacctccctaattaattccataaagccagcatcaccctaataccaaaaccagaaaaggacacaaccaaaaaagaaaactacagactgatatccttgatgaacatggatgctaaaatccttaacaaaatacaagctaactgattccatcaacatatcaaaaatataatccatcatgatcaacacttctacactgctggtgggaatgtaaacaagtacagccactatagaaatcagtatggagattccttaaagaactaaaagtacaactaccatttgatccagcaatccgactactgggtatctacccaaagggaaagaagttattattcaaaaaagatacttgcacatgaatgtttataggagcacaatttacaattgcaaaattgtggagccaacccaaatgccaatcaatcaatgagtggataaagaaactgtgatatatataatggaatactacgcagccataaaaaggtatgaattaacagcatttgcagtgactggatgagactggagactattattctaagtgaagtaactcaggaatggaagatcaaacattgtatgttctcactgatatgtgggagataagctatgaggatacaaaggtgtaagaatgatacaatggactttggggaattggggggtagagtgggaggggggcaagggataaaagactacaaatatggtgcagggaatactgctcaggtgatgcgtgcaccaaaatctcacaaatcaccactaaagaacttattcatataaccaaataccacctgtaccccaataacttatggaaaaataaataaaataaataaatgaaaaaataagtgagaaagtatgaagtttgcctttctatgcctggcttatttcgcttaacataataaccacgtgttccattcatgttgttacaaatgacaggttctaattatttttgtggctgaatagtactccattgtgtaaatatagtataatttttattgattcatctgttgatggacatttagatggcttccaaatcttggttattattaataatgtccccataaacacgggactgcagatatctctttgatactgattttctttcttttgagtatatacctagcagtgagattgctgaatcatatagtacctctatctttaccttttgaggaacttccaaattgttctccataatggttgtactaattcgcattcctaccaacaatgtacaagggatcccttttctccatattcttacctgcatttgttattgcctgacttttggataagagtaattttatatggggtaagataatatctcactgtagtctttgcatttttctgatgatcaatgatattgagcaccttggcatataactatttaatatttgcatgtattttttgagaaatatctattcagatcttttcttcattttaaaattggattgtattttttctgtagagttgtttgagcttcttatataatgtaattattaatcctttgtcagatgaatattttgcaaatatttactcccatcctgtggggtgtctcttcactttgttgtctctttactgtgcagaggacttttaacttaatgtaattccacttgtccatttttgttttggttgtcagttctcacaagatattgttcaagaaatatttgcccagtccaatgtcatggagagtttctcaatctatttcatagaagaagtcttagatttaagtatttaatccatttttattttattttgatatatggggagagacaggcgtgtagtttaagtatctgcatatggactgccaggttccccagcgccatttattggagatgcttccccttttccaatgtatgttcttgacatctttgtcaaaaatgagtttactgtagatgtatggacttatctctggattatttcctctgttcaattggtatatgtgtctgtttctcatgccagtaccatactgttttggttactatagatagctctgtagtataatttagagtcagttaccatgattcctccagttttgttctttttgcctaggatagctttggctattctgtgtcattgttactccatatatatttttacattatttattctatttttgttaggaaggtcattggtatttttacgggaattgtattgtatctgttgattgctttgggtattatggacatttttaaagtattgaattatcctatccatgaagatgaaatatcttttcatttttgtttcttcttcactttctagcatcaatagtttataatttttattgtagagatctttcacttatttggtcaaaagaatgcctaggtattttgttttatgtgtagctgttgtaaatggcattaccttctggatttctttcacagatttttttgctgttgtcatgtagaaatggtactaattttgtatattagtaatgtgtactgtgaatttcctgaatttatcagttggaatagttttgtggtggattctttaggttttttccaaatataagatcatatcacctgcaaacaaggataatttgacttctttatctccaatttggatgttctttatttctttctcttgtcttattgctctaaataagtcttctagtaccatgttgaaaaacagtagtgacagtggatatccttgtcttgttgcagatagtagaggaaaggttttctggttttcctcatttcaaatgatactacttatgtgtctgtcatatatggctttcatttatgtttaggtatgttccttttataataagtgttttgagagtttggattgtgaaagaattttgaatattatcaaatactttttctataatacatcaattgaaataatcatatggtttctgtcctttattctactatatgatgtatcacattgattagattctgtatgttgaaccatacttgcatcctgaggataaatcccacttcatcatgatggatgatttttctaatgtattgttgaatccagtctgctagtactttgtggaggattttttcttcaatattcatcagggatattcattggcttctagttttcttttttcgctttgtcttcctctggttttgatatcagggcaatgctggtgttattgaattctttaaatgcctggtaaaattcagcaaagaagccattggatcccagacttttctttgtttggagtctttttattatagcttccatctcattacttgctattggtctgttcacattttaaatttcttcatggttcaatctttgtcgttggtatgtgtctaggaatttatccatttcctctaaattttccagtttattggcgtatagttgctcatagtagccactaataatcctctgaatttctgcagtatcagttttaatgtctcttttttcatctctgattttattatttgggtcttcttactatttttgtagttagtcaggataaactttcctcaattttgtttatcttttaaaaaaatcaactttttgtttcactgacctttttgttatttccttcatttaaatttttccctcttagtactactttcactgtatcccacagattctggtatgttatgtttcctttatcaatcatttcaataaattttttaatttccttcttaatttcttcattgacccactggtcatttacaagcatgttgtttaactttcatgtatatgtatagttttcaaaatttctctggttattgatttctaattttattcctttgtgattacagatgatacttgatatttttttgaatgttttaagtcttgttttgtggcatatcttatgatctatccttgagaatgatccatgtactgaggaaaagaatgtgtattctatagctattggatgaaataatttgtaaatatcttttaggtctatttgttctgtactgcatataaaattcttcgtttattttctgtttggaagatctgtccaatgctgaaaagtgaagtgttgaagtctccagctattattgtatgagattatatttttctcttcaattctaatatttgctttatatatctttgtgctcctatgttgagtgcatatatatttataattgttataccttcttgcttaattatccccattatatttatacagtgaccttctctgtttctcaaagtttttatcttgagacctactttgtctgatatatgtatagctactcctcctctttactggttactattgacatggaatatgtcttttccttccatttattttcagtctctgtgtgtctttataggtgaagtctgtttcttgtagggaacacatccttggttcttgcttttattcactcagcatccccatgcctttttatttgatagcttagtccatttacattcaatattattattgatatgtaaggacctactcctgccattttgttatttgatttctggttgattactggacttcccttctttcttactttctctttctttctcttctgcctttttttaattgcaggtggttttctctgatattattatttaattttttcttttaatttttatgcacctgatttttggttaccatgagacttgcaaatactattttataacccattatattgagctgatgacacttaacactgtttgtatatacaaagtagaagaaaaataataaaaactctacactttaactttgtcctcccacattttaacatgtgttgtttctatttatattttactgtattgtctatgtcttgaaaagttgttttaagtattatttttaattgtcacatcgcttattctttctacctaaaataaaagtagtttacacaacacagttacagtgctacgatattattttttatttgtgtgtactattattagtgaattttctaccttcagatgttttcatgttgctcattaatgtctttttctttctgatagaagtactccttttagcatttcttgcaggacagtcctggcgttgatgaagtccctcagcttttgtttgtctgagaatgtctttatttctccttcatgtttgagaaatactttcaccagatatactactatagtagagtactttttttttctcttttttaaatttattattatactttaagttttagggtacatgtgcacaatgtgcaggttagttacatatgtatacatgtgccatgctggtaaaaaatgatgagttcatgtcctttgtagggatgtggatgaaattggaaatcatcattctcagtaaactatcgcaagaacagaaaaccaaacaccgcatattctcactcataggtgggaattgaacaatgagaacacatggacacaggaaggggaacatcacactctggggactgttgtgggtggtgggggggtagggatagcattgggagatacacctaatgctagatgacgagttagtatagagtacttttaatatgccatgccattgtctcccggcctaaaaggtcccggcctgaaaaatctgctgccagtcatatagatactccattgtccattatttgtttttttttttctcttgatgcttttagaagcctttctttattgttggccttggggagtttgactgttagatgccttgaggtagtcgtctttgggttaaattggcttagtgttctataaccttcttgtatggggatattgatatctttttctaggtttgggatgttctttcctattacaattttgaataacctttgtacccttgtctttttctttacctccttttcaaggccaataactctttgatttgctcttttgaggttatttttaaaattctgtagccatgcttcattgttttattttatttttttcttttgtctcttctggctgtttattttcaagtagccggtcttcaagctcactaattattttttctgcttgatcaattatgctattaaaagactctgatgtattcttcagtatatgaattttattttttgacaccagaaattctgtttgattttttaaatcattttcatatttttattaaatttatcttatagaattctgaatttcttttttgtgttatcttgaatttatttgactttccttaacacagctattttgaattctctgtgtgaaagttcatgtatctctgtttctccaggataggttcctggtgtttatttaattcatttgctgaggtcattattatcttgatacttgtgaatgtttgtctgtgtctggccattgaataattagggtttttttgttttgttttgttttgttttgttttgtttttaacagtctgggtttgtttatacctgtccttcttgggaaggctttccaggtattcaaaatgacttgattcttgtgacctaagctgcatctgccttatggggcacctcaatcccaataacgctctggttatttcagactcctagagacactaccttgaatgtcttaataaatatggagaattcatgggattaccaggctgaaactattgtcctgttcccttattttatcccaaacaaatggtctctctctctgttctgagctgcctggagcttggggtggggtgacacaagcagccctgtggccaccaccattgtgactttgcttagtcataccagaagccagcatagtactagattttacccaaggcccaccataactacaactagactggcgcctatgtttgctcaaggccttgggggctccacaatcagcacgtggtgaagccagcaaggcttatgttcttcccttcagggaaccaagttcgcatacaccctgaatggatacagaggtttgtctgggagccagagagtggagtgaaaggccttaaagtctacttggtgttctattttgttatggtttagctggcaatcaaaccacaggattcagaccttcccaatgttccttcctctttccaaagggggaggagcttcatcccatgaccatcacctccacagtccaatggcaagtatggccagcttaccaccaatgttttcttaagaaacaggggctcttcagtcaacttgtggtggttgctacctgtcttgggactcacgtttcaggtcactagactcttctctggacaaggaaatgtccagaaatcccatccaaaagccaagtcttatatttggagagcttaagatcctctttggtgttctaccacacagtgtccaagctactacctaagttttaagacaaagtctcctttactttttcttccgcttttctgaaacagaaggagtctctccccatagctaccacacctgggaatgtgaagtcttatctgaagccatcatgtctcagagtctcactgaaggctcatggcatattacttggttactactactggttttcagggctcaagggctctttagtcagtatgtgatgcttcatgccagaactggattttttccattcgagacagtggtttctcttctggcccagagtgtttctagaaatgttatctgtgagctaggtcctggaaagggaaccccacgaccctgactggtgccctatccttctgtggctgagctggtgtctaagatgcaagacgaagtcatttttactcttcctttttctctcctcaagtagaattaaggagtcttttttgaagctgtgagctgtgcagcctggagttggtggaaggttggcaaaagcactttctcagcttccctgctcgtgactcagtaggtcgcatgccccacaagtccactaaccctgagaccagtacagtacttgcactcacctaggagttgcagttcttgtgggctagatggcctttgaagtttatttgtggctccagaggactttagcctgtggtggcaaacttggtggaactcaagttctgactgctgggattggtgattcccctctggctaggactgttttaaatattccctccatgggtgcaagtcagctaagttcaaccaagttttgctttctgctataacacagcagcactgagttcaatgcaatttattacaattactgcactctccctatcccaaacaaatgaacagaatatctgtctgcatcatgtggtggcttccatggtatgagggagtggtggcatcagttatttaagactgtcttttctaccctcttctctgtctctttcagtgatatgaacttaaaaccaggtactgtgcatgctcatctgatttttggttttacaaaggtgttttttttgtttgtttgtttgtttgttttgtaggtagatgttaaattggtgtccttgtggagaaaggggacaatcagtgcagttttctatttagccattgtattagtccgttttcacactgctgataaaaacatacctgagactgggtaatttaccaaaaaaaagaggtgtattggacttacaattccacatggctggggaggcctcacaattatggcagaaggcaaggaggagcgagttacatcttacgtggatggcaacaggcaaaatgagaacttgtgcaaggaaactaccgtttttaaaaccatcggatctcatcagactcgttcactatcacaagaacagtgcgggaaagtcctgcccccgtaattcaatcacctctcacagggctccttccaaaacacaggacaatcatgggagtcacaattcaacatgagatttaggtgggaacacagccaaaccatagcagccatcttgcttcacccctactctaacgctagaagtttttaataccaccacatattgtgttcacaattccctgattgccttaatttaaaaaatattttggtaaaatatgcacaacataacattttccatttttcttaagtgcataattcagtagcattaaatacattcaaaacattatacaacccataccactactcatttttagaactttttctccatcctaatcaaatactgtgtaaccattaaacaatgactttccgttcctcccttgccatatcccatactaactgctaatctactttctaactgtataaatttgcttattataggtacattatatatgtgaaattatttaatatttgtcattttgtctctggcttatttgactcagcataatgtttccaaggttcatctatgttgaagcatcttttaggatttcattattttcaaggctgaataatattccattgtatgtgtatatttattgtatgtgtatccctttgtgtgtttatatcatgaatgttttatctattcatctgttgatagaaatatgggttgtttcctccttttggctattgtaaaacaaactgctacaaacactactctgtatatatctcttttagttcctgctttcaattcttttgagtgttatatacctgggtgtgtaatttatacactatatagtaattatgtgtttaacattttcagaaatcaacaattttacacattttctctgatattttacatcctaccagaaatcttaagattttcaatttctccaagttattaacaacagtagttaattttcaccttcctaagtgttgtgaagtggtattttatcgtttttatttggattcctgctgtggctactgatagtaaaaatatttaaactttcttatgggccatttgtgtaccttctttaaaaatgactactcaagattttaccaatttttgagtttagtcgctttatttatttctttttgttgtgttgcaggagttctttaaatactctggatattaatgtctcataaaatatatcatttgcaaatattttctcatattctataggttgccttttcacaactaaataataatgccctttgatggagagaagtttttgatttggatgaaatccagtttatctattttctcttgctacctttgtcatatccaatacatgattacaaatctgtcaaaaatattttctctatgttttcttttaacagagaacctcagtttgctaatattttgttgaagtagtttgtattagtattcataatggatattagtctgtaataatttttcccttgtgatgttgtctggtttgttttcagggtaataatggcctcatagaatgaggctcttagtgttcgcttaaatttttttttgagaaatattagtgttaattatttaagtgtttgattgaattctccagtgaaatcatatgttcctgttgttgttgtttttgagagcttttttatcaattgccttacttttctcaggtgaattcagatattttcttatttcttcatgagtcagtattaatagagtgcattttctagaatttatttatttacattaaattggtttttgtgaatacaattattcatagtattctccttttgtcatttttttattcctctaaaatcaggagcaatgcccctgttgtagtctgtttctctaatcactatcatgagaacagcatctgaaaaagctcccccatgattcaattactttccaccaagtcccttccataacaagtagggattattacaattcaaggtgagatttatttgggacacagagccaagccatatcagttcccaatttcatttcttttattttttgtctccaactttaattttaggttcacagggtacatgcgcagttttgttatatgggtaagttgcaggtcgtggaactttaacatacagaatattttttcaccaaggtaatgagcatagtaaccgataggtagttttacaatcctccccctcctcccacctttcaccttcaagtagaccctggtgtacattgtttccttccttgagcttatgtgtactcaatatttagttcccacttataagtgaaaacgtgtgatatttgtttttcttctcctgtgttaaatcgcttaagacaatgatctacagctgcatctgtgttgcttcaaaagacatgattttgttctattttatggtagtgtagtatttctacatgccatattttctttattcatcccacttttggacatctgctttgattccacatctttgctattgtgaatagtgctgtaatgaacatttgtgtgcatgtgtccttatggtagaatgatttgtatttctttgggtgtatacccagtaatgatatcactaggtcaaatgttagttctaagttctttgaaaaatctctaaactgctttccaccaacagtgtataagtgttccattttcttcacaacctcccctgtatctgttattttttgactttgtgataacacccaatctgactgatgtaagatggcatctcattatagttttgatttacatttctctgatgattagaaataaagagaattggttatatgtttgttggccccatgtatgtcttcttttgagaagtgtctgtttgtgtactttgcctattttttagtggggttatttgtttttagcttgttgatttatgttctctataggttctggatattaggcttttgtcagatgcatagtttgtgaatatcttctcccattctgtaggttgtctgtttactctgttgatagtttcttttgctgtacagatgctctccagtttaattaggtcttacatgtcaatttttgctttttttttgcaattacttttggcatcttcatcatcaaatctttgccaggtcccacgtccagaatgatatttcctaacttttcttcttgagtttctacagttttaggtgttacatttaagtctttaatccatttccagttaatttttgtatatggggaaaaggaaggcttaaggctcaatattaagcatatggcttaatattatgctattggatttatccaagcacaatttattgaatagggagtcttttcctcattgcttgttttggttggttttgttgaagatcagatggtgttaggtttatggtttatttctcagttttctattcatctggtttttttttttttttttttgctagtaccaagttcttttggttactgtgactttatagtatcatttgaaatcagatatttcaatgcctccagctttatactttagcttataattgttttgtctattcaggctctttttgattgcatataaatttaagaataccctttgctaattgtgtgaagaatgacattggaatagtaataggaatatcattgaatctttaaattgctttgggcagtatggccatttgtaaaatacttatttttccaatttatgagcaacaaatgtttttcatttatttgcattatctggtttattttagcaatgttttgtcattctacttgtagaggtcttttacctccttgattagctgtattcctaggtattacattttccttgtggctattgtaagtgggattgggttcctgatttcactctcagcttgaacttttttttttgtatatagaaatgctactgatttttatacattggttctgtatcctgaaacttcattaaagtagttgatcagttctaggggccccctggtagagtttttagaattttctttgtatagaattatattatccataagtagagatagtctgacttcttctatttatatttgaatgcatttgcttatttattttgcctgattttcctaagtaagacatccagtactaggttaaatatgagtggtgagattaggccttcttgtcttgttccatttctctaggggaatggcttgagcttttgcccattcaatatgatgttggcggtggatttgtctttgatggctcttagtattccatggtatgttccttcaatgcttagtctgttgggggtttttatcatgaagggatgttaaattttatcaaaaaaaatttctacatctattgagatgatcacttgtttttttttatttaattctgcttgtgtcttaaatcactttatttgtgtatgttgaaccagccttgcatcccaggaataaagtctacttgatcatagtatattcactgatgtgcagctgaatttggtttgctaatattttgttgaagacttttgtgtttatgttcataagtggtattgacctgaagtttttgttgttgtgtctctgccacatgttggtattagccttatacttgcttgctagaatgagttaggaaggtgatcctcctccccacttttttggaatggttttagtatgattattatcattagttttgtttttgtttttgtttttgtttttaagacagagtttctctctgtctcccaggctggagtgcaacggcgtgatcttggcttactgaaacctctgtctccctggttcaagtgattctcttgcctcagcctcctgagtagttaggaatacaggcatgtgccaccatgcctggctaatttttcatatttttagtagagacagggtttcaccatgttggccaggctggcctcgaactcttgacctcaagcaatccaccccccttggcctcccaaagtgctgggattacaggcatgagccaccgctcccagcctagtttttctttatatatctggtaaaatctggctgtgaatctatctggtctaggactttttttggttggtagtttcttcattactgattcaacttcaaattttgataattatctaatgagggtttaaatgtgttcctgattcaacctggtgagattgtatgcttccaagaatttatttatttcctccagatgttctaatttgtgtgcatagagtagttcatagtagtccctgaggattttttgtatttctgtgagatcagttataatatcacatttgtctttttatatatatatatatttttattatactttaagttctagggtacatgtgcacaacgtgcaggtttgttacatacatataaatgtaccatgtcggtgtgctgcacccattaactcatcaatttttttgattgtgtttatttggatcttttctttctttgtttagctatcagtctgacaatcttattcattttttcaaatcagccactattggttttactgaacttttatatggatttttgcatcttcatttcattaatttcttctctatttttagtttttattttgttctgttggcttaagtgttggtttatttattttttttagtttcattaagttcaaagttagagagttaatttgagatatttttgtcttcttgataaaggcatttagggctataaactttcctcttaacactgctttcggtgcatcccatagattttggttagctgtttctctactttcaataattttaaagaatattttgatttctgccctaatttcaatgttcacctaggttttattcaagaataagttgtttcatttccatggatttttgtagttttgagagatctctttgatattgatttccatttttatcacactgttgtttgagattgtgcttgaattcactgagacttgttttatgaacaagcatatagttgattttagaatatgttccatgagcatatgagaaaaatttatattctaaggttgtttcgtggagtgtactgtatatgtttgttacagatagccattagagtggcaggagaagggcccccctacccttcacacaccaggaatgtcaaatgatcaggtgatggtttgaaaattatcccattgaccctctataaatgataatcgacagccggcctcagggaaagacaatctcctaatggtccacagctgttaacattacagtgttaattgaatgcaggtgccaggaagaagggaggattccaataaaatctcatgtattggatgagtgagcctgggcatgtgcattaagaagcacaatgatggagtatgacctcccagggacactccaccggaaaagcaaagaaaagcctcagatgggcatgtgtacaacttcctaaacacactgcacatgctcacttcccaagtataaagttctatgatcaaggttaaacactgcactgtttcttcaagttgcccacttggatctcttccaagtgcactttcctttctttcctgtgctaaagctttttaataaacttctactcctgctctgaaacttgccttggtctctttttctgccttatgctcttcaggcgaattatttcttctgaggaggcaagaattgaggttgctgcagacctatactaatttgctacctgtaaatcagataccttcaactggtaacatgtttattaggtaagtgtcaagtttaagtccagacttcctttgttaattttctgccataataatatgtctaatgccatcagtggggttctggagtctactattactattgtgtgattgtctaagtattttataggccaagaagaacttgttttatgaatctcggtgctccaatgttagctatgtatacatttagggtagttaagtcctcttgtttgatcgtacccttttttgttatgtaatggccctcattgtccttcttcatttacattagtttaaaatctgttttatctgacataaaaatagtgactcctgctctttctgttttccattggcatggtagattttactccacccttttaccttgagctcatgggtgtttttacatgtaaaatatgtctcttgaatacaacagatggttgggtcttctatttttatccagcatgccactctatctctttcaaatgggttgtttagtacatttacattaaaggttagtattaataaccataattttaatcctttcattttgttgttagctgtctgttatgtagatttgattgcatagttgcttcacagtactttgagctatatgcgtaagtgtgcttttgtggtagcaggtgtcattcttgttattctatgtttagcactcccttaaggatctcttgtaagaataatctagttgaaatacattccctcagcatttgctgtccaaggagaattttatttctcattcacgtatgaagcttagtttggagagatataaaattctttcttgaatttcttccttttaatgatactgaaaataggccccatttttttctacaagcgtaatatttctgctgagaagtttactgctagcctggttgagttccctctgtaagtgacctggccctgctctctagctttccttaaaatttttcttttgcattgatttcagtaaatataatgaccatgtaccttgggaatggtcatattgtataaaatcagtccggagttctttgtaattcatggatttttcagtttctctaatgagataataaagtttcatggacctaattctcaaatatatttcccaagttccttgtactttctcctcctctctcaggaatgttgacaagttgtagatttggattctttacataattccatattttattttttggaagtttttctcatttttcttaatttttaaaaattttttgtccattcaaataacttgtctttgagctctgagattaattcctcaacttggtttattctgctgttaataaatccagttttactgtgaaattcttgttgtaaaattttcagctcctgaagttcagttttgttctttcctagaatggctatcttgtctttcagctcttgaataattttactctattgcttggtgtccttgaattgaatttcaactttctcctctatcttgatgagcttcgttgccatccacatttttaatttcatgtcagttatttcagacatttcaggcgggttaagaagcattgctgcagaattagtgggctcgttttaagaggacatactggctttttaaattactcaagatcttgtgctgactttttctcatctgggaatgttgtcattcctttaattttggtgtaaatgggagtatagtcagttggcttcatttttggtagttttcagagcattaaagttctgtatagggtctttgtagtcaaatttttgcttttggtttcacagagtggggagaattagtaaacatttttagtgttgtagtttgggcagcgatccagtaaatggcacttgtgaacagttggcagtagacaggctcttactcagccacatggctcatttgtgtatacttgaattttcagttgttttctgtggtgtgagatgaatagaagtgacctcctcaccagttctgctcttaggccttggggaacccacctctgatcattggcactgtacccacaattttgttgttgttgctgttgttaggtcttcagggccatggggctcccttgtagagaggttcagtagagagatagcccactctcctactagaccagcactgtggagggaggcatgcctaagtcccagatcagcacttgaaactgtgaaactcgccactcttatttttctgagagtgtgggctcctactctactcaaatgctgcacacagattcctggcttggcactcctgagccacaagctacagccctgggtaacaaggacctgctcatggttccttcctaccaacactcagggataggttctaggtgtgttggggtatctgaaggactcccagactgctggaactaaaccaggtggagcaaagcacacagaatgggcagcagaggttgcactgtgtacacattcttgtggagtgaccaggcagaagctctggaaggttctggtaggcctgcagctcagatatgtctcagtcccaagaggaagcagtcccttatttctccctggaagttagcttggaccagagcctctcagagggagatgagcatccctggggggtcagcccttattgctgggctctactagagctgtcccatgcccaaatgtccctggctctgtgcctgctgcagcttcatctctgcctaatctctgaggagatccccctgccagctaaaatgtctgtggatgctgcaggaatcctctgaagctaggatcccagaggtccacagcaaaagtgggaattccctcagtctcttcacttacccctttcctaggtgccattcggggccagggatgagccctggcattcaggcaggcttccaagttttcttcatatttagcctcagcatctgcatattttatccatccacattgatcatattccttctggagatctgttcaaattatgtacattaaatgaaatcccaatctctgtgggagtggcacttcccggctgcatctagctgactatcttccaataggtctccaatgttcctctattgtttatttatctcggatctattgttattgttttcctcttttaatacatttgaactatttgctcttcttttcctagttccttcaaggcgtaaagttgttaaagaattgagatctttcttgcattagaatgtagtcattactgcaataaattttgcatttaccactactttcactacatctcataaattttagtgtttgtgttttcattttatctcagttatttttaaattttctttgtaatttctaattgtatccatttaaacttttagtgtgttgtttaatttccacatacttgtgaattttctagtattccttctgttatagatttctagttttcttgtgagcaaaaatattactacatataacttaaaactaaaaaaataataattaagacttgttctgtggcctaagacatgttctatcttggagagataatccacatgcatcaagggagagacctggttggaggtgattggatcattggggcagtttccctcatggtgttctcatgatagtgagtgaattctcatgagatctgatggtttcctgaggggctcttcccccttcactctttgctcttcttttctctctcctgtcactttgtgaagaaggttcctgttttgccttctgccatgattataggtttactgaggcctccccagctatgtgaaactgtgagtcagttaaagcttttttctttacaaactaactggtcttgggtatttctttatatcagtgtgaaaacggaataatacaacataccagtaggtcttggttctttaaccagcttgtaattctgtgccttttaattggggaatttagtccatttacattcaaggtttatatgatatgtgtagatttgatcctatcttcatgatgttagctggttattatgcagacatttttgtggttgctttatagtgtcactgctttgtgtacttaaatgtgtttttgaaatggttcataaagttcttccctttcaatatttagtgcttccttcaggagctcttataaggcaggtctggtggtgatggatttcatcagcatttgcttgtctggaaaatatcttatttctccttcaattatgaagcttagtttggctggatatgaaattccttgttggaatttctttcagaatgttaagtattggcccctaatctcttctggcttttagagtttctgctgggagttctactttttgtcttatgccattctctttgtaggtgacctgacatttctctctagctgcctataaaattttttccttcatttgaccttagataatttgatgactatatatcttgggaataattttcttaagaaatatcttactggagttttcagcatttactgaattttaatgttggcctctctagcaagattggggaagttctcaggaatgttatcttgaaataagctttccaagtttgtcccattctcctcatctctttcaggacaccaaatagaggtagatttgatctatacataatcttatatttctccaacattttgttcattcctctttatttttttctctttttaaaacttgttttctttttatttcttttatttcaatagtttttgggggtacaggtggtttttggttacatgaatgagttctttagggatgaattctaaaattatagtgcaccaatcaggcaagcaatgtacactgtacccaatatgtagccttttattcctcaccctccttccagcatccctgccagagttcccaaagcccattatatctctctgtatgtctttgtgtcctcatagcttagctcccacttataagtggcaacatacggcatttgatttttcattgctgactcactttacttagaataacaagttccaggccgggcgcagtggctcacgcctgtaatcccagcactttgggaggccgaggtgggcagatcacctgaggtcgggagttcgagaccaacctgaccaacatggagaaaccccatctctactaaaaatacaaaaagttagccaggagtggtggcccatgcctgtaatcctagctacttgggagactgaggcgggagaatcgcttgaacccgggaggcagaggttgcggtgagccgagatcacaccattgcattccagcatgggcaacaagagcaaaattccatctcaaacaaacaaacaaaaacaaacaaacaaaaaaaacaacttccagctctatctaagtagctgcaaagacattattttgtttatttttataactgagtagtattttatggtgtatatacaatcatattttctttatccactcattggttgatgtgaacttaagttggttccacatctttgcagttgtgaattgttttgctataaacatgcatgtgcatatttctttttcacacagtaacttcttttcctttgagtaattacccaggagtgagattgctggatcaaatggtagttcttcttttagctttttaaggaatctccatgctattttccatagtgtttgtattaatttacattcccaccagcagtataaaagtgttcccttgagactttactggattcctttatggatctaggagctctatgggtgagtctttagggttttctaggtatacaatcacatcagtggtgaacagtagaattggtgaaagtggaaatccttgtcttgttccagttctcagggagaatatgctttcaaatttttccattcagtatgatgttgactgtgggtttgaaatatatagtttctattactttaaggtaagtcccttctatacctagtttttgagaatttttattagaaagggatgctggatttgatcaaatcctttttttctttgtctattgaggtgatcatatggtttttgtttttaattctgtttttgtgaggtatcacatttattgacttgcatatgttttaccattcttgcatacttgggatgaaaccaacatgatc

SEQ ID NO: 851 - DNA, 42896 bp, Homo sapiens
  Genbank Accession No. AL021977
ttctcattctagccctttccctttccactcctttcaattctgcctatgacccaacagtaaaatcatgtatttgtacagggccatactggttataaagctttaccttctacattttctcattcaaattttgaacctcatggcagacttacgagggcaggaggtacagttcccctgtcacagatgaggaaactgagacttggacagaaaacaggttccaaactccaggcagaaactctaacaaaaacaatgcattcaaaaacaatgcattcagcccaagggtgcagcctcaacgttgccaaaccgaacctgcctgacatcctgttgggcgggtaagaggcaggtgagggaaagacccagaagctagggggaggtattcgttggggtcatgtgggtagcccattaaaaatacggccacaggtccccttgccctgtgccctccctgtcccacacccacaggcttgccccgacccagtcccatgatcaccctggtcacatgctccctgtcaccagcttccaagtcatctgtgggagcaggaggtggacacaggattaggggtgggagactctggggtggccaggctgaggggaaggagggagcatgtcgggggcaggtctggaggcacgcgagagaggaaaggcaaggaaaaaaagcagggaggaaaggcaggagaagcagggagtgagaaatgagtagaggcaccacgaaaggtggagacggacgtgaagtggggaatcaagtgagcacttagaggagcacaggaaggaaaattaggacggccaatggggcctaaagaggcactgagggtcggggaaagagaagagatggattgactcgggaagttagggatactgagggagacacacggaggagactggggttcaggggagaaactcagggtcgaagctggggtccctggggtccacaagttcgagatgagacacgggcggtctcgggatgggaattggggacgcagggggatgaaaagatggaaggtgggggcactcagggagtcacataagggttaatggaggacatgcctcagaatcggagacacgaggaatatccaaaggagggtccggcggagacttgggagtccggagcgccgaggaagttggggaacggacccccaggccccgcccacccgcgaggtcactcacctcggcttactcagcacttctacttcctcctacttccgcaaacaaacgggcctcgggccacgtgatggcctgaccaccgctctccgccaatcactggtggccctgtcccaggcctcctctaggctccgcccccgcgcccgaggacggcgggaggcggggtccgccattttttttaactgcccaatggaaggggctcccttagccaggaggacgagctttcggcgggagccaatcctcggcggcgaggcgcggccatgtttgtgcggggcagaaggtgcccggcttcttggcagtcctgttgatgagggccaggagtcctaccctagtccgccttccgcctcctaaagcgaccagagcctggagtctgaagttactgttaatgattgctcgtaaagataaaaataaaggcaacagaggcatagggcataacaaggaggaacctgttttgatttttgccaggtagcctcaagccagggttgccagatgtagcatataaaaaatacgggatgttaagttacatttgaatttcagctaaacagccaatacatttttttccgatagaacagaaattgattatagcttttttatttttcacaactaaggccaaattccctaggggaattaccacatgtcctttttttttttttttttgagacaagtctcgctctgtcgaccatgctggagtgcagtggcacgatctcgctcactgcaacctccgcctcccggattcaagcgattctcctgcgtcagcctcccgcgtagctgagattgcaggcgcccgccactacgcccagctaattttttgtatttttagtagagacggggtttcaccatgttggccaggctggtctcgaactcctgacctcaagtgatctgcccgcctcagcctcccgaagtgctgggattacaggcgtgagccaccacgcccggctccgaaatttttaacataagtataatatactaagtttagtattgtgttaaaaatgtgtgcattgttgtctggcaacacaccctgagccagtctcaggaaataccttagcactttcagtaggaacttgggcaaatgatctctgtgaacctcagacccatcatccaggaagtgggcacagtaatacaagattgttgtaatatctagaagtaaattggtccccattcgtgcacatagtgggatttcaataaatggcagttgttagggttaataatgccgataatgaggtattttgcagagaagccaggagactagactttagtcacacatctgcttcggactgagcaggtcatgtcctctcttcagcccactggcttggttggaccttttctttccctaataatcacccaaccctaggtctagatgaatctgccagactgctctccatttacgtgggaagtatagttgcgggtgtcattcttgtgaaaagaagcgtgtaggccgggtgcggtggctcacgcctataatcccagcagtttgggaggctgaggcgggtggatcacttgaggtcaggagtttgagaccagcctgaccaacatggtgaaaccccatctctactaaaaatacaaataattagctgggtgtgctggccatagtctgtagtcccagctgctcaggaggctgaggcaggagaattgcttgaacccaggaggcagaggttgcagtgagccaagatcatgccactgtactccagcctgggtgacagagccagactctgtctcaaaaaaaaaaaaagtgtgtttcctccttagtccgtctaaagatattagtgcctagacagggcagccaatgcaacttgcgcaaggtttagttaagaatcttcacaggttaatgaaattaaccatcttaactaatatctgtacagagctttaccagttacaaagtgacttcacttccatcatatcctcgtgtccccattttacaggtgaggaaattgttccttaaagtaagatttaaaatttgcttaagagtttcagcttgactgcgcacagtggctcacgcctgtaatcccaacactttgggaggccgaggtgggcagatcacttgagctcaggagttcaagaccagcttgtgcaacatggagaaacctcgtctttaaaaaaaatacaaaaattatccaggtgtggtcttgcatgcctttggtcccagctactgtgcaggggaggccggggggtcaaggatgcagtgagccaagatcgcctgcactccagcctgggtgacagagcgagaccatgtctcaaaaaaaaaaaaaaaaaagtttcagcttgaagtggagagaaaaggataaagactcagaattctcaatgaaaatatcttgcctccacaccccaaacaagcaaagttagagcgatggttatcaaggagcttgcaaaaggccatgcattccacgcactgccaagcaatctttccttcctgagaaaacccacaggggcaacatgaggtgtcccattcttcaacaaacacccacccttgcattcaggattttgcaaagcacatttggaaatgcagatacacaggtgaatctaaaatgcagacaagggccaggtgtggtggctcatgcctataatcccaacactttaggaggctgaggcgggtggattacctgaggtcaggagttcgagaccattctgaccaacatggtgaaaccccgtctctacaaaaaaatacaaaaaaattagtcaggcgtggtggcaggcaactgtaatcccagctactggggaggctgaggcagaaaaatctcttgaacccaggaggtggaggttgcagtgagctgagatcacaccagtgccctccagcctaggcgacagagcaagaccccatctcaataaataaataaataataaaatgcagaaaaggccaagagaggctggatcaattgctggaaacagtcaaagatccacagaagacattcacaaaatagaatctcagtacctgatgaagttaagtatcccttccctaggtatttctggtggaaaccatttaatgagtagataaatcaaaagatggaatagaggggattattaggtagcattgaatgagcaagtaaagggatggggcaagtaagcacgagggagtgtgttctgtagtgctagcagatggagctgctagcagttaaagtcaaaagaacttctcctgaggtgttgtgctaggctcctcccatacatcagggagggcgtctgccctctaagagcccagagcacagagggtcagactagactaatcttttccttcaaggagctagatggaaatctaactaacatgctaacagtgcaatatcacaccttttacttttttttggagacagagtctccctctgtcacccaggctggagcgcagtggcgcgatcttggctcacggcaacctccacctcccaggttctaactgattctcctgcctcagcctcccgagtagctggaattacaggcgtgcactaccacgcctggctaatttttgtatttctaatagaaacgaggtttcaccaagttggccaggctggtctcaaactcctgacctcaggggatccacccgcctcagtctcccaaagtgctgggattacaggtgtgagccaccacccccagccgacttcttacttttttatccttgcaacagccctgtgatatagtactgccatccccactttgtagatgaagagaatgaggttccacaagggaaaattatccccagagttgccaatgagaggcagtgccagttgccagtgtcaacgagaggcagaaccagaatcagcacctgtcttgtcttttctctctccaaactctaggagcactcattatgtgccaggcagtgttcttggtgcacgtgtaatcccaggcactgaacaaaatggacaaaaatccctgcctttgtgctgctcacatcctggtggggaaagacggagaataaactagatagagaaggaaacagagagtgtgttttgctaatgtctttgagtgagggtgtcatcatgttagcatcttacattcaaagcaccttaactgtgggatctgggcatgtctatttgaatacctttgcactagtcctccaattatctgtgtgtttgaactttttctttctttctttcttttttttttttttttggagacagggtctggctctctcacccaggctggagtgcagtggggtgatcttggctgactgcaatctctgcctcctgggctcaagcgatcctcccatctcagtgtcctgagtagctgggactacaggttcaggccactatgctttttttttttttcggtagagtctgcttttcgccatgttgcctaggctggtctcgaactcctggcctcaagcaatctgcctgcctcagcctcccaaagtgctgggattataggcatgaaccactgttcttggcctgaacatttttataattaaaaagttggaggaagctgggcacagtggctcatgcctgtaatcccagcactttgggaggccgaggcgggcagatcacttgaggtcaggagttcaagaccagcctggccaacatggtgaaaccccgtctctactaaaaatacaaaaattagctgggcgtgacagctggcacctgtaatcccagctactcgggaggctgaggcaggagaatcgcttgaacccggaaggcagaggttgcaatgagccaagatcttgccactgcacgccagcttgggcaacagaaggagactctgcctcaaaacaaaacaaaacaaaacaaaacaaaaagttgggggaatatatagtgagttagagggtgaggaatgctggggagtaaacacaggaaggagagaccggggagggtcacagttttaactagatgggccaggaaaagcgttagaagggagataattaaataaagacctgatggaggcgaaggagtgagctatgtgcacaaccaggaaaagagtgttccagatggagcaagaacaaaggccctgaggcagaagcccgcctggcttgttttaagaggaaaagcaaagaggctattatagctttgttttggagtagagagccagtgggggtgtagtaggcaataacgttgaggttaaaaggatattgggagtagaacttgtaggacactggaaaccattttaagactttggctttcaatatcagggcaatagggaaccatgagaggtttttaagcagaggagtgaccagaatgaatttacactttaacagcttatgtctgttcagtgagaatagagtgtaagggaaggcagaggctgggagaccagtgaggaggctattgtagaaatccatggtcgggcatggtggctcatgcctataatcccaacactttgggaggctgaagcaggcagatcacgaggtcaggagttcaagaccagcctggccaagatggtgaaacccccgtctctactaaaaatacaaaaattagccaggcatggtggcgggcacgtgtaatcccagctactcgggaggctgaggcagagaattgcctgaacccgggaagcagagactgcagtgagccgaggtagtgccactgtactccagcctgggtgacagagtgagactccatctcaaaaaaaaagaaagaaagaaagaaagaaagaaaaagaaatccaggtgagagatgatggtctgaccaccagcccatttaatcatcacagctataggtacgttacagtccaagtttgtgttacgataaaatacgtaagccattgctagaaggcattgtcaaactccttcctgtgggaagctttgtgagattattcttgagcagcagtgggcaaactatcctgcctgccacctgtttctgtaaacaagtgttattggaacacagccacgccatttgtttacacacgtttctgctttctgcagtgggagaattgagtaatcatgacagatacctcatggcccacaaagcctggaatatttctctctggccctttacagaaaaaaaaatttacccaccactgatcttaaattggatgtcaaaggttaagtaggagtttgccggctggattaggaaagagaacattctaggtggaaagaactgtgtgagcaaaagtcaataccatgagattgtgtggattgtttggggaccggcaaggggttgagcactgctgaaacctggtgtgtgagcaggagaacagtccccagaggccatctagaaagagtctccccctaatcccagcactttgggagcacaaaacggctggctcgcttgagcccaggagttcaaaaccagcctgggcaacatagcgagactctcatctctacaaaaattttaaaaattagccaggcatggtggtgcatgcctgtagtcccagctacttcagaaggctggggcaggaggattgcttgagccccagcctcccaagggaagggaggttgtagtaagctatgattgtgccactgcactccagcctgggcaacttagtgagaccctgtctcaaaataagaaaaaaagggctggtgcggtggctcacgcctgtaatcccaacactttgggaggctaggcaggcagatcacttgaggtcagtagtttgtgaccagctgggcaacatggtgaaactcctgtatctactaaagctacaaaaaattagctgggcgtggtggcgggtgcctgtagtcccagctactctacttgggacgctgaggcacgagaatcgcctgaacccgggaggcggaggttacagtgagctgacatcatgccactgcactccagcctgggcaacagagcgagactccgtctcaaaaaatatatataaaagaaaaaaaaagaaagagttttgagttccaggccaaggatgcagaccttgtcccacaagcagtgggtgccctggaaggttggggccaggaagcaatgtggaaaaatccttctgctgccttgggagaggtgatgggagggtgcggagcccacacggcagctgtgcatgatgatgctaattacatggcttctgacttgctgagtgggacatcagggcttgtgccctccacaggagggaagtgggctcctcaggaggtgaccctgagctgtgaggcagcagccaagtgtgttcccatcccaagggcaaaagccaggcctggtcaggaagggcaggatttccctactctggggggacctcagcccagctcaggggttcacaggacagactgcgggctgaggagaagctggttctcaggaacagggaaccagggagcttcacaaggaagctggcttaaacctgagtcctgaaggatggtgaaggatggagaagggtggagagggatggagaggaatggatagggataatgagggatggagagggatggtgggggatggtgggggatggagagggatggagagggatggtgggggatggtgggggatggtgggggatggagagggatggtgagggatggtgagggatggtgagggatggtgggggatggagagggatggtgagggatggtgagggatggtgagggatggtgggggatggagagggatggagagggatggtgggggatggttagggatggtgagggatggtgaaggatggcgaaggacatgaggatttggagaggctgagcaggggtatttcaggcaaagatgcagggtgtgtgccaagcctctcacgatgggggaatctaatgtggagttcttgagggtcagagtgtgcaagctcttaatccctttgtcccttctcttgtgcttctcgtcctcatttatgttttgtcagccattaattatgaaatacctgctatgtgcatgaccttactctttttcttttcttttcttctttttgactcaaagtctcgctttgttgccaggctggagtgcagtggcgcgatctcagctcattgcaacctctgcctcctgggttcaagagattcccctgcctcagcctcctgagcagctgggactacaggcgcgtgccaccacacccggctaatttttgtatttttagtagagacggggtttcaccatgttggccaggatggtctcaatctcttgacctcatgatccgcccacctcggccttcaaagtgttgggattactggcatgagccaccatgcctggccggccttactcttagtatggtggggacactaaagacatctctattcttgtccttggggctcacaatttaatacaaacttgtctcagatatacagataatagtttattgtgaaaaagcactggaatataaaggcaaatatatttttccatatcatcgcatgttctatggtctgaatgtgtgtatcaccccaaaatactttttatttattttttattgttttgagatagagtcttgctccatcgccgaggccggagtacagtggcatgatctcggctctctgcaacctccacttcccgggttcgagcgattctcctgcctctgcctccccgagtagctggaattacaggcgcccaccaccaagcccagctaatttttgtatttttagtagagatggggtttcatcatgttggccaggctggtcttgaactcctgacctcaagctatctgcttacctcagcctctcaaagtgctgggattacaggggtgagccactgtgcccagcccctaccttttttttttttttttttgagacagagtcttgctttgtcacccaggctggagtgcagtggctcaaacgtggctcactgcaccctccatttcctgggcccaagcaatcctcccacctcagcctcccaagtagctggaaccacaggagagcaccaccacacctggttaatttaaaaaaattttttttgtagagatggggcttgctatgttgccccagctggtcttgaactcctgggctcaagcaatcctcctgccttggcctcccaaagtcctggtattacaggtgtgagccaccacacccagccctgataatcctcttttatgtcccaggggctcctgaaattctactgcaaatcacacattcatgagtaggctgaatcactgtgcccccaggatgcaatggtaatgaaacggaattgcagggatctccagagaatcaatccgtgtttggctgccctgccatagcgttacacagggcatgagggcaatcagtgatataaacacagtccccactgtcagggagccaaaggacattgtaggaccgaggtccccaacctttttggcaccagggactggttttgtggaagacagtttttccacggagccgggggatggtttgggaatgatccaagtccattacattgattgtgcattttacttctattattattacattgtaatacataatgaaataattatacaactcatcacaatgtagaatcagtgggagccctgagctggttttcctgcaactagatggtcccatctgggggtgatgggagacagtgacagatcatcaggcagacagatcatcatattctcataaggaatgcaaaacctagatccttcgcatgcgaagtcacaatagggtttgagctcctatgagaatccaatgccgccgctgatctgagagaaagtggagctcaggtggcaatgtgagtgagcaatgggcagcggctgtaaatatgctgtaaatatcgatgaagcttcactcgctcacccgcccgccgctcacctcctgccgtgcagccgagttcctaacaggccatcgacccagaccaggggttagggacccctgttcttagaaactaatgatactctcttccttcctccctgtctcgccacagcctgaccctcttgcttgagcctaggacaaggcccagtggaacaaggacaactcctccattcatcccattaacattcatcatgctcccagcgtaggcacggtggcctaggcagggcatggtggctcacgcctgtaatcccagtactttgggaagctgaggcaggcaaatcattgaggccaggagttcgaggccagcctagccaacagagtgaaaccccatctctactaaaataaaaaatacaaaaaaaaaaattaaccaggcgtggcgatgcacgcctgtcatcccagctacttgggcggctgaggcgtgagaatcgcgtgaactcaggaggcagaggttgcagtgagccgagatcacgacactgcactccagcctgggtgacagtgcaggactgtgtctcagaaaaaaagaaaagaagaaagaaaaacattgatcatgcttctgctatgtgccatggcccgggcaaagctctggagacacaaaaatgaaaggatgtaatcctggtcctcaaaaagcatgtgggttaagagaagacagccatgaagacacagaacaccgagtcagagaggaaagtgctatcatgagggatacactggtaggtttcctaccttgtacacaggaacctgagtcagcctggggatgatctgggaagcctgctgaacaaagtggcatctgagctggggactgaagcacaagccggggagggagttccaggaagaaggactgggaagattgaaagcacgaggcagtagaagagaatgatgggtatgaggacagagttcacggtggctgcagctgagaggaggtggtggaagcaggcagaggccagatcgaggaggcttatggaaagagtttacactttgtcctgacagcactggggagccatggaagggttgtgagcagagcagtagcctggccaagtttaggttttagaaagctctctctatcctctgcatggaggctagaggcagggggaccaggcagaaggctgctgcaattgtcctggagccaggtgctgtggcttgaacagaggccatggctgagggaagagagaggctggagagaagttaaggagatgagatcactgaagcctggtgacttgtttgctgtgggagggagggagagggtgaggtgagcatgatggcctggtttctctccagggtgactggggaggaggtggcatcatcaacctgttggagaaattaggtggggagggtggcgctaagctccactgagacaacgtggagttagacgtgccagggaagggcaggggaaaatacatgtcatccatgcagttgcttaagcagatctggtccatgagagacagctgggagcccaaaatagagatctgggagtcctcaacatcaggtggcacctgaaatcttgaggtagggataaggttccccagcaataagaaaagagggcaaaggctaaagctctgagcctcgctaagaattaagaggccaagatggagggccagggatgaaagctgaaaagataggagggaaatctgagctttagaaggcaaggggaggtaggcatgtggctgcatgcctgtaaccccagctattcgggaggctgagacgggaggatggctggagcccaggagttcaaggttacagtgagctatgatggcactactgcactccagcctgggcaagggagggagaccctgtctcaaaacaaagacaaaaacaccaaggagaaaacagtgtttccaaaaagaggggaagaataggccgggcacagtagctcatgcctgtaatcccagcactttgggaggccgaggtgggtggatcacctgaggtcaggagttcgagaccagcctggccaacatggtgaaaccctgtctctactagaaatacaaaaatgccgggtgcagtggctcacgcctgtaatcccaacactttgggaggctgaggcgggtggatcgtgaggtcaggagatcgagaccatcctggctaacacggtgaaaccccgtctctactaaaaatacaaaaaattagccgggcgtggtggcgggggcctgtagtcccagctacttgggaggctgaggcaagagaatggcgtgaacccaggaagcagaacttgctgagatcacgccactgcactccagcctgggtgacagagcgagactctgtctcaaaaaaaaaaaaaaaaattagctggtcgtggtggcaggcacctataattccagctactcaggaggctgaggcaggagaatcgcttgaacccaggacgcagagattgcagtgagccgagatggtgacactgcactccacccttgatgacaaagcaagactccatttcaaaaaaaaagaggaaaaaaattaaaaggaagggagattgcaacaccattgcatgctgtcaaaggtcaagacagattagggctaaaattggacctggatttagtaacaaagaggccactgggaccccggccagagtcccttcagaggtttcttgagggcagccctcagcccgtgagggattgggaatgagaggcagtgagaacccagaggcaatgagtggggatgacttgaggtttgcccacaaagggaagaaaaaacaagggtgggtgttagggtgagggtggagtgaaaggtggggttcaggggtggctgctagagatgacagccacttggagacatttcagtcccatctccagtgtggtggcaggtgcctgtagccccaactacttagaaggctgaggcaggagaatcacttgaacccaggaggcagaggttacagtgagctgagatcttgccactgcactccagcctgggcaacggggcgagactgtctcagtaaaaaaaaaaaaaaaaaatccagacgaccccagtacctactgttattattgtttatgaatctcgttgatgtgcctaagagctgtcatctcccaaaattctatgaagtatctgtatcacccccactttatagatgaggaaaccgaggctaggagggctgaagccatttgcttcagagggaggggatggggactggggtgtgggcatggggattctggaaggaggagaggtaggtttagggcaagacaaaggacagcctctgaagggactgggagggagagggaagggcaggtgcagagggtcgaggcagtgcctatcacatggcctctgcttcctctggaagtggcaggagagcaggttcgatggagatgaggatgaaggcctgcggatgaaggagaaaggcgagtactccagggattcctggcagctctgaggatctggctgtgactggagaagatgaccttgtcgtgaccgcagctgttgttgcagtggtggttgtggtcgcgatggtggcttctctccagaagccagagcagctggcatgcaggagtgaagtgcacggagcagcagtgccccagcgatggttttacaggcttggcacaaaaggactcagaccagggctggcacatctccaggtatattgaagctgctgggggtggggaggggggggaggttttagagggaaaatgatggagggctggggaaaaatggagcatgtgcagtactgtttcaggttcctaaaatatcagtttgcaaacataaaaatgtattctctaaaataggcaaagcacacgaacaaaagaagaaaaaacccaactggttaacaagcaaatgggaatgtgttcaagctcattcctattcagagaaatgcaaatttaaatacaataacgtcatttgcctaggaaattagcagagcttagacaatgaaaactcccagtgttggtgaagtggagacgaaaggttcatattcacatgtgggtgggaagggcccttagcaaatggcttcagccctcctagcctcggtttcctcatctataaagtggggatgatacagatacttcatagaattttgtgagatgacagctcttaggcacataaatgtgattcataagcaataatacgcctgtagtcccagctacttgggaggctgaggcaggagaatggcgggaacccgggaggtggagcttgcagtgagccgagatcgggccactgccctccagcctgggtgacagagcaagactccgtctcaaaacaaaaacagtaacagtaggtactggggttgcttggatttatttttatttttattttttgagacagtcttgctctgtcgcccaggctggagtgcagtggtgagatctcagctcactgcaacctccgcctcctgggttcaagcgattctcctgccttaacctccggagtagctggggctacaggcgcatgccaccacactgggctaattgttgtattttttagtagagacgagagtttcaccatgttggccaggctggtctcgaactcctggcctcaagtgatccaccttggcctcccaacatgctgggattacaggcatgagccactgcgcccggcccaattgtttgggtttgctcaaaccttttttctctctgctgaacaatcacatctccagcccagactcaggacccttgtatttgcagaaagtggccctggtcaagagtcaccctctgccaggccctgcccggtttgccttaggattgacaaagtagagggaagggaagaggaggaagaaggggaggagggcacaaggttcctccaggatcccacccgggggtgcccacgcggagaaatggcgtgtgctctaattatcgtcagactctgaagtggcccacgtgaaatatcgaatctctccagaacaaaacccagcaaatcattccggcgggggcagcaggagagagcgcagccctcgagtcggaccagcctgagtttaagtccttctctgccagggactagctgtgcaatactgggcaagattcctcacctgccacggtctcgatttcctcatctgcaacatggccatgataatagctaagtgctaagacatggagaggattgagtgtgacctgatacacgggagcaccacacctggcatccagggtgtggtcccttggcctctgggcgaactgatcactctgtccatttcctctgcttttgacaccagggaccatttcgtagaagacaacttttccacagatgagggtggggtgggggtggagagtggggagtgtgggtgggggatggtttcgggatgaaactgttccagtggccaggcgcggtggctcacgcctgtaatcccagcactttgggaggctgagcggggcagatcacctgaggtcaggagtttgagaccagcctggccaacatggtgaaaccccgtctctactaaaaatacaaaaattagatgggcgtggtggcgcgtgcctgtagtcccagctacttgggggaggctgaggtgggagaatcagttgaacccaaaaggcggaggttgcagtgagccaagatggctacactgcactccagcctgggggatagagcgagactctctccaaaaaaaaaaaaaaaaaaagaaactgttccacctcaggtcatcaggcatatctggccgtagttagattctcacaaggagcacacaacctggatccctcaaaagcgcagttcacaatagggttcacgctcctaatgagactccaatgccagtgctgatcctacaggaggcggagctcaggcggtgacgctcactcagcccgctggttcctaacaggccacggacaaacagtactggtcctcagcctgcgatttggggacccctgctgtagaggactcctctctctaacctgatattattgatcttttattatatactaagcgctgtgccagaggcttataagtgcaaacacattatgttgtttcacagcctgcaaaggaggcactattagcccggtttatagagggtggagatgacgtcagctgatgaggcgtggggccaggatctgaacccgacaggctgacttgagagtccctactttcaaaaaacaattttttttttgagacagtctcgctctgtcgcccaggctggagtgcaatggcgtgatctcggctcactgcaacctctgcctcccaggttcaagcaattctcctgcctcagcctcctgagtagctaggattataggcatgtgccacaactcccgactaatttttttttttttaattaagtagagacagggttttgcatgttggccaggctggtctcaaactcctgacctcaagtgatctgcctgccttggcgtcccaacgtgctgggattacactgcgcctggccaaattttcttttcttataaggacactggtcagattggattagggcctaccgtatatattttaatttacttatgccttttaaaactttatctccaaatacagtcacattctgagatttttaggcattaggacttcaacatacacattttaacattatgaaattccacccataacactatctatctatatgtattattttcagaaccatgtcagagtaaattgcaaacatgatgccttttacctctaaatactctagtgggccaggcacggtggctcacacctgtaatcccagctcttcaggaggccgaggcagacagatgacctgaggtcaggagttcaagactagcctggccaacatggtgaaacccccgtctctacaaaaatacaaaatttagccgggcatgatggtgggtgcctgtaatcccagctactcaggaggctgaggcaggagaatcacttgaacccaggaggcagaggttgcagtgagccaaggtcgcaccattgcactccagcctgggtgacagagcaagactccatctcaaaaaaataaataaataaataaataaataaatactccagtgtatatttcctaaaatcaaggacacattctcttctatgaccacaggacaagcattgaagccaggaagttgggcatccatgcagtaattacctcatctacaaactccgtggcaatttgccccttactggtgatattaactttgatcacttagcgaaggttgtgtctgccaaatttctccactgcagagttattatttttccttccataattaattatcatcttgtgggtaaataacttgaaactatgtaaatactttctcatcaagctttcatatccattggtgattcttgctgcaacccatgattactatggtggctgcctgatggtcatttcttttttttttttcttcctcttctttttttaatagagacaagatttcgccatattgcccaggctggtctcaaactccgggctcaagtgatcctcctgcctcggtctcccaaagtgctgagaatacaggtgcgagccaccatgcccagcctgagctcccacttttaaataggacattgcaccatggcccttgatcttgaccagaaagggagctatgtctatgggaagcagtccctgcagggtggataatgaggcactgacccccttgttctggcaggctggggatgggagtaaaggatctaggcagcatggtgtccaggagtgttgttcaggtccactgagaattcactcactagctgagcacctacagtgttccaggtgtggccccagctcttgagaagctcataaaaaagggagtagattgggaggctgaggcagaaggaaggcttgaggccaagggttcaagatcaacctatgcaatatggtgagacctccatctctgcaaaaaatagaaaaattatccaggcacagtgatgcacacttgtagtcccaactactcgggaggctgaggtgagaggatcgcttgagcccagaagttcaaggctgcagtgagctatgatcatgccactgcactccagcctgggcaacagggcaagaccctgttttgttttgttttggttttggttttaaagggggtggggggtagagaaaatagacaactcaccattgtgcagtttctaaaactgagaactttcctaccccaaaggttaacctaggtggctctttctgctatgcacatggagaggactgagcaattggtttttagagatccttttgagtgctagacaaagctgcctcaacatttggtcacttgggaaactagtgggccaatttgcataccaaacccacagcctgtgggagggaacggaaagaagccatagtgtctggtggaccaaggcacagaggcaggaaagcaagacaagggcgctgaaatcgaatttgctacatcaaggaaagtggggggctgggcgcggtggctcacgcgtgtaatcccagcactttgggaggccgaggcgggtggatcacgaggtcaggagatcgacaccacggtgaaaccccgtctctactaaaaatacaaaaaaaaaaaattaggagggcgcggtggcgggcgcctgtagtcccagctactcgggaggctgaggctggagaatggcgtgaacccgggaggtggagcttgcagtgagctgagatcgcgccactgcactccagcctggggcaacacagcgagactccggctcaaaaaaaaaaaaaaaaaaaggaaagtggggatccttactggtgatcagggtgccacatagaggcctacccatttggagaggccctatgccctccacagtggagtaagtgccatgatgtcggcttcacaggagggactgtgggagcgatggaatttcaggcagtgggaacatcatgagcaaaggaaagcaggggatgaacagcaacatccaccccgcacgtggcctccaaagccatctcttttgggtggggcttcccaccacggcgcacacccctcatgtttatgtggccctcctcccctggttgcgatgtacccccaaacatctgggccaggaatcattcagacctggataccaattccagtgcttgtacttcctagctgagtgaatttagaaagtcaccttcacctctctgagcctccagtcatgtattccttcaacatgtatttactgtgggcctactatgtgccaagcactactccaggcactgggcaggcagtggtgaacaagataagcctggccaggcgcagtggctcatgtctgcaatcccaacactttgggaggccgaggtgggtggcctgaggtcaggggttcaaaaccagcctggctgggcatggtgactcacctgtagtccagctactggggggctgaattccttgaacctgggaggcggaggttgcagtgagccaagattatgccactgcactccagcctgggcaacagagtgagactctgtctcaaaaaaaaaaaaagaaaaagaaaaagaagcaaggcctgccttcataaaacatacattctggttggggaagacagacaataaccagcactcacatacataaatgatgaaacaccctacagaagtattaagataatataagaacaaatttcaaggctgggtgcggtggcttgcgcctgtaatcccattactttgggaggccagcgtgggtggattgcctgagtccaggagtttgagaccagtttgggcaacatggcaaaaccctgtctctacaaaaaaaaaaaaaaaaaaaaaaaaaaaaaaatacaaaaaatgaacctagcatggtggtgtgtgcttatggtcccagctacttgggaggctaaggtgggagaatggctggagtccaggagaaggaggttgcagtgagccgagattgtgccactgcactccagcctgggtgacagagtgagaccctgtctcgaaaaaaaaaaaaaaattcagaggtgaagactgctttaaccagggtggtcaggaaatgtctctctgaggcagtgacatccgggctgacgtgaaagatgagaaagagtcaggcaagtgaacagaagaccagacagccagtgccaagggcctgtcgcaggaatgagcttggtatgtttgggggacagaaagaagggcactgtggccgaagagcagtggatgaggagagagtggccaaagaaggtgtgtaaacaacctgagctttgttttgagaagaacattggctggtatagaaagaaagactttggaggcaaagtagggagcctcggaggctgctgccattgtccgggtaagctgatggtgccgagaccaggtgccatgactggaggtggtgagaaatggtcctatgcaggagacctggagacaccgctagcttgagtcctgaggtggggaggaagggagagggagggatggagccaggctccaaggttttggcttgagcagctgagatggggtggcaagggagcagaggtagggctgacgatcaggagcgggtttttgggccgagtcctctgcagtgcccatctgacacccactggatgcgcagagtgggcagctggctatgagtctggaactcagagaagctgttcgctccggaaatacaaacctggggctcatagccatataaatgtcatttaaagccacgggactggatgagatcattaaggcagaaggtctaggtcgaaagaagagggccaggaccactacctgtaaaatgagccaatgacacctacacccacggggctctcgcgaggtgtcacgtgaacgcacccagcgagccctggaaccaggcagagaatcgcggcagccccgggggcggggcttccagggggcggggtcatacgggggcggggccgagggaccaagcggccgctcctggccggagggcggccgggtcggtgacgtcaccgcatgactgggtttttatgaatgaaaggaatcctgtgagtgagtaattccgggaagctcgccttacaactccgcgcggcctcggccccctgcgccgcccgccccacaacaaaactcagcgcagcgctcccgggcgcccggttcagagcgacctgcggctcagagcggaggggagactgaccggagcgcggatcgggacagcggccgggacagcggcgagacgcgcgtgtgtgagcgcgccggaccaagcgggcccagaagcgggtgaggaacgcgggaccaggaggacggtgcgcgggaccccaaggcggcagggtttctgcgtcccgggatgcgcctggggtgggcgcccgggcccgatccgtcggggctcccggagctccatcgcccggacggctcggggcggggagaagggagcggccgtcccggggacgccgaggacggggccgaggccagctcgggggagtgggggtggagacggggccccttcccggggcgcgggcgggtaggcggcggcgccgggaggaaggggcagcgcaggccggcgatctccgcgtccgcccggcgggggcgggggcgctgtgctcctacgtgactcggtgggaacaggccctggcccggcgcccgcgggcggtgcgtgcgcggtttgtttacgtccgagggcgggcgtgtgttccctggcgggcggcctgggtatcctgcccggtgcgtgcgtgcgctgtgtacctcgggggcgtgtgtgcgtgtgttgtgcttgtgtgtgcgtgtccgcgcgcgcgctccctggggcctgtacaccagcagtgtgtacctcggagagggcgtgccctgggccggccaccggagtaaacgcggaacaaggacccgagcgaaggaagcggacccgtgcgtcttcgcacggggtctgggaattctggcccgggccgccccagtcctactacccggggctgtccgtccccggctctccccggagtttcccagggcctccgccacgtgaccccagtgtttgtctcccgcccagagcccgcgcccgcagccacagggtggggcaaggtatcaaagaccccacccagctgagctaggagtgagggatgtgagccacccccgcttggcaccccggtggatctggtaacaaagtgagttggagcccaggttcttgtccccagattttggggcttcctggggagggaagaaccaagggactctcgttcgtccccagggttgcccatcccctcagtcccatgagaacaggaagggccagaaaaccttgactgcaagggtgcggcgcagggagaggaccacaggcttttagctagtccgggttctggaggctgtacctgctaggtcgtggaggatggggcggagccggtttccgctctcctggtagtttcagttcacaagtgggactggtgagactagactgacctacagctggacgccggaagctagctgaggctctgagccagccgacagaccccgagtgccctcaccctgggccaggcagggtcagtaggcattggggatagaactctgactgcacggagggttaatgagtgaggggtggggcctgacctagccgccacccacccactcacccaatagccctgcagaaagcacctgtttgtcgtagccgcctgcaggatgggctgggggctagagattccttggtcttaatccaccttccccctccacccacccacccacggtctatggaattgtgggaggggagcaattgaacttgctagggtgaggaaccaatgatcttttgactttggatctttgaaccctgggtgagctctgctacagcagcccggaccctcagtattcccatctaccactgggaactaggtaacagccaggatggcaggatggtgggtagaagggggaagctctggaagtctgtgcagacagcgtattttccaggtgaattgtggaagagaaagcagggctgacagccccatgccaggagctgggggtacccaagagtaggtggggtttgagtcaggagggttggggccaggagcacaggaaccagacaggcccaccctcaaagctgggcaggaaacattacaaagtagggcctggggtcaggggatgaggggaagtggctggttgactcagtcccagatggaaagttagcactgagaagtttaacttcccattgaatcacccctgggccctgcattgccattgggcccttgtcctggaccagatgccagggatgagatgaacagaccagatccagagactgccctctgggagcttatagctcagcagcggacacaaacttgaaaaaagatccacagaagtaaatgcaaaacacagcttagatgggtgatgtgagggagaagtcactgtggtttgaaagtacataacagcgctctgacttagccagggcaatcaaggaaggcttccctggggaggtgactagtgtgctgagtctgatagagtggtggttgtctgtgaagcccttgaaggcaggagctgtgattcacttcagggtctccagggcccagcacagagcctggaacatagtaggtgcttcttggatgtttgctgattgaatgaatgagccctggatccctgccctctaagagctccacaacacatggagaaaaaggcctgggaaccccagagaaacaggaagccagggcaggggctgggggaatcttgaagcagtctcccaaaagcgagcaaatccttcaggactcaggcaacttcctccctcacacacacaggcatgcactgcccgcttgtccctttgggaaacattcagggatagtagaatttgctgtctgttcattcatctgttagcatacgatcctgggagagagtggacaggaatacggttgaggcctgaggaccctactgtgttggcttgcggggaggctggcattgcagggttttgaaatgggccaagcacggacaggctcgtgggtttgtgtcagtagtgattcctctgacagctcttgggggaggatcaatgatggggattggagacggagggcaaggcaagaggctggtgagcaggcggttgtggtcatggtccagatgaaggaggaagtggtctgtggctgtgcaggtggagaagagggctagtctgatagtctgatagtttgtgtctcatgcccccacctccaggaagccttcaccgctttcctttccctacctccattctgctggtggtcttggagctctgggccagaatctgaaactctaaactcagagacagtcattgttggaaggtaccttaggctcggaggacgtttggcatagtgggaaaactgaggcccagagagagggagtgccgtacctgaggccacacagcgagtgtgagagggtacctgaactggggctggaaccccaggccgttgcttctctgtggtgcttggttcttccagccttgctccccttccagcagggaggaggctccagcagtgctgactgccaagagctaggaaaacacattttttccctgtcctcacagagcgagcagaatggctcagcagccagaaaggagcccatgccagcgggtgggccttctacaggatgtctctggagtggactggtggggccagggagggggacgttggagggttgtggctgctgactggacaaggcagttgtcagtccctcaagagtcacctctctccttatgcctccagaagacgtcatgaacctgcagaccctggaggtcagctctgctggcttccaagggaagaagccagggagaggtggtggtggccgacatagaagacagaggacccctgggttccagtccgccacggctaccaaacagtggcttggttgcctcaggtgctgaacaggggatcggatcagctactatttctcaggcccagggtcagccagcctggcaaaggcagaggacccaggccccttggcagcccctggcctggggttggcagcggaaagcctgaggttaccagaaagttcccccttcttgtgactttccccctgtgattgcctgactgctgagctaggacattcctgggcaaacgtgggtgcctcagctgacatccaggatgcggttgagggggctgaggctcggacaggagggcatggaggagtgggggaagagcaggttcaaaaccttcctagcacctgagggtatttacaatcacagccagcttccgctattatcaaggatagggaatggctgatggttccatctctcaggcctggtctggaggcagtgttgaggattctaggctgtgtccaagctcaggagaaaacagttctgtgctgagaaagactcaggggctgtggcctgcctcactgggaattggtgctgtgtgtggttagtgatgtctctgttgcttgtggatagtgggatgatggtgagatgaggtgatctttcttgcctatgcctcctttttttttttttttttttttgatggagtctcgctctgttgcccaggctggagtccagtggcttgttctcagctcactgaaacctccacctcccgggttcatgcaattcttctgcctcagcctcccaagtagctgggactataggtgtgcgccaccacacctggctaatttttgcatttttttttttctttagtagagacaggatttcaccatgttggccaggccgttcttgaactcctggcctcagatgatctgcccaccttggcctcccaaagtgctgggattacaggcgtgagccaccacgcctggccttgcctaagcctttatattttacacaccaagattattgtgattattcccacttagcaaggaatccaggactcaggaaaaatgacttgtgcatgaggccagactgtgcctctgaggttctgtatcagccgcaacacccaaagggcagttgattaacttgcgtggggagaggcttcccttctcccattgggtctttctgtgtagctcaggtggccaagcatcactgcacgtgccagctccccaaacggctggtaagggggcctggatacttaactgtaacttgcaaatcgtatccctagcgggcccaacacaaatcctggagaatcagagctggggtggccttggaaactggcaagtccagcttcatcttcacagggctagggaaacagggcccagggaggtcgccctgccagggccacacagggaggaggtgtgtggctccatgtggcctcaggcctgaattctattattattattattattatttttgagatggagtcttgctctgtcacccaggctggagtgcagtcgcgtaatctcggctcactgcaacctctgcctcccaggttctaagcgattctcctgcctcagcctcctgagtagttgggactacaggtgtgtgccaccaggcccagctaattttttgtatttttagtacagacagggtttcactgtgttagccatgatggtctcagtctcctgacctcatgatccgcccacctcggcctcccaaagtgctgggattacaggcatgagccaccttgcttggccatctttttttttttttttttttttttttttttttttttgagacagagtctcgctctgtcacccaggctggagtgcagtggcgcgatctcagctcactgcaagctccatctccgggttcacgccattctcctgcctcagcctccccagtagctgggactacaggcgcccaccaccacacccggctaattttttttttaagaggcggggtcttgctttgtcacccagggagtgcagtggcgggatcacagctcactgccgccttgaattcctgggctcaatggttcctcctgcctcagcctcctgagtagctggggctataggtgtgcaccactgcacccggctaatctttttattttttggagatggagtctagccatcttgcccaggttggtcttgaactctcaggcctgaattctaccccatgctggctgtatgagcctggactactctattgtcctctctgggcattacctcagggttgggcgaaccagggaggtgacggtgtgaagggaccaggtttcagtcctgggcctttgcagctattcattcacacctattgtgtgacttcaggcaagtgctgcccctctctgggtctctacctccccttgggtaaagggaggaggcaggacctgatggcctctaagggcctttcctgcagttccctgtgtgaccccagccagctgggagatgctaaatcagagcgagaccccagtgctggctacaggcctgacccctcctggacagacagcaattctaacctcccagctgctcactgacctctacagtgtataccacttgattccaccaaaaccctgcgaggcaggtattgttccgatcctttagatgggaaagtggagacccagagagatggagtggctcaccccaggtcacacagcctgagaaaacagagatgcgacttaaacccaagcttgactcccaatccagtgctcctttccctgtttcccacaccccacctttgggcccaaagtcacgtggatgggatcccctctgctctcttcccattcgcctagcatctgtactgtctctgccaacaggcccaaggaagcagctggagaggaggaagaattagagacagggccaggaggtactgaactacgtttcggcttggaacccggcttggtgacaagctgggtgatggcgtcagagactctgaccatccacccttccccagtgcctgctccctgccaggtcttgagatgggtggcctcaagcacccagagctgactcagcctctccctgtctggtggagagacagcaaggaaatacaacccattacacacaggggtgggggtccctaacaagtcctagggatcagggagggcttcctggaggaggagatgtctgcacccagggccgaaggatgagtaggagtctgccaaacaaagtagaggggagtgaggggagagaaatatcatggggtgggaggtggctcagaggcaagaaagcgcgggtgggaggaagtgaaagaaattctgtgtggctggagcacagagtggaggtggcagtggtgggaaatgggcgtggggctggacacacagggcctggggtgctgggagggtgggtctggactccatccttaggatagtagggaaccatggaaggttttttttttgtttgcttgtttgtttttgtgtttgtttttgagatggagtatcactctgtcgcccaggctggagtgcagtgtcgcgatctcggctcactgcatgcttcacctcccgggttcacgccattctcctgcctcagcctcctgatagctgggactacaggtgcctgccaccacacccggctaattttttgtattttttagtagagacggggtttcaccatgttagccaggatggtctcaatctccttaccttgtgatccgcccgcctcagcctcctaaagtgctgggattataggcatgagccaccttgcccagccgaaccatggaaggctttaatctggctggtggcatggtcagattcgcgtggtgcaaagattgtccagctgctgtgtgggaatgagctgagaccagcagggaggtgtgctgggacctccccaggtgtgtgtagggtggtgagggtgaccacttaagaggcctgcattgggttgggcgtggtggctcacacctgtaatcccggcacttcaggaggccgaggcaggtggatcacctgaggttaggagttcgagaccagcctgaccaatatggtgaaactctgtctctactaaaaatacaaaaattagctgggcgtggtggtaggcgcctgtagtcccagctattcaggaggctgaggcagagctaatcgcttgaacccaggaggcggaggttgcagtgagctgagatcctgtcactgcactccagcctgggcgacagagcgagactccatctcaaaaaaaaaaaaaaaaaaaaaagggaaaaaaaaaaggcctgcattgaaaggtaggatcggtgaggttgacatgtaaacgtctccagatagtatctgaaaggtcagggtagccagcagatctcatatgacttttccaggtaggatgggagtgcacagaggcccccaaggagagctaggtgggcagccagggcctgagccccctaggatttggagtgctaggcagggaaactgaggccagagcccaggctaagccggcatgttcagcagtggggggtcgcagctcaggggtcaccccatgaagccactggtcttcaccgtggatccgcacaggggtctaaagctgcctgggtcctgacctggcactctgggtccacccagctacccccagcgaaacctgggtgacccctaagactctcctgcttaagggccacagtggctgcccctgtcaggggatctctgcaagcgccaacttccttctgtcccactccttccttccctgtgagctgccagaccccctgactgtgtgggctgggaggagctggggagtttcctgagaagccctggactgtccccaccttggcctgagtcacactgagaactcagcaaggattccttgagtatctgcgaggtgccaggcgcggttctaggcatgggggaggccgcggtgaatcaggtataagttctgccctcatggagctggcattctaatcggggggttgggagggacagacactgaacaaataaccaccatatatgtgagtgatgacaattacacatggggaaacctgaggtggggaagggacacagggagtgtgtgtgtgtgtgtgtgtgtgtgtgtgtgtgtgtgtccgtgtgtgtatcaggggttgcaaattctaaactgagtgaacatgagatttgaagagacctcaggaggtgatggagcaaactttgtggatatctagggaacaaggatgccaacagaggccatgcgtcgtggctcatgcctataatcccaacactttgggaggcggaggcaggcggatcgcttgagccaaggagttcaagaccagcctgggcaacatgatgaaactctgtctgtacaaaaagtacaaaaattggccaggtgtggtggcatgcacctatagttccagctactagggaggctgaggtaggaggaccacttgagcctgggagtttgaggctgcaatgagctgtgatcgtgtcactgcactccagcctgtaacggagtgagtgagaccctgtataaaaaacaaaaacaaaaacaaaaacgccagcagagggaccagccagtgcaaaggccctggagaggagcgtgcatcctgtgttgaggaagggcgggtgtggctgaggcaggggaaacaaaaggaagccaagtagggctgaggttggagaagggatgctggggagcactttcttttttttttttttttcagacggagtctcactctcgcccaggctggagtgcagtggcacaatcttggctcactgcaacctccgcctcccgggttcaagcgattcttttgtctcagcctcccaagtagctgggactacaggcacgtgccaccacgcccggctaattttcgtatttttagtagagacggggtttcaccatgttggccaggctggtctcgatctcctgacctcatgatccacccgccttggcctcccaaagtgctgggattacaggcgtgagccaccgcgcccggccactggggatcactttctgcagcactttgtgggccatggtgacaactctggctttactccagtgagccgtgggaaggtcctgagagaggtgtgacatgagctgacttaacacagctacctgtgtcacccagggggaaagtgaggcacagaaagagtggctgacctatcagaaccacacaactagagagcgagaccacccccaaaaggccccaggtgtgtctggcaccaaggtccatgtgctttccatttctgcaccttgtccctgggagacaccccggtcctgccagaatgtgtcagaggctgagccaacccgtgaggtcaaccctgtagacagctcaaggaaccaggacttggatctggcttttgccctctgctgtccacaaaactgggtgatgctctttccgatacggtacgtgtttataggatgctacagctcagatcacaaagcatcttcctttgttttctttttatttatttattttttttgagatggagtctcactctgtcacccaggctcccaggctggagtgcagtggcgcaatctcggctcactgtaacctccacctcccaggtttaagcaattctcctgcctcagcctctcaaatagctgggactacaggcatgcaccaccacgcctgggctaatttttgtgtttttggtagagacagggttttgccatgttggccaggctggtcttgaactcctgaactgaggtgatctgcccgtctcagcctcctaaagtgctgggattacaggcgtgagccaccgcgcccagcctatcttcctttattttccttggcttcttatcactgccccctccccttggagacagatgagaaaactcaggttctcatggcggagaacctgagaggattggcaaagtagatcctatcagctagagacagagaggactgctgctttaaaggggactttgggagatggtccccttctccagcccagagcaatgaccactgaccctccacgagttttattcacctttttctccccattaccaagtacatgtttggcaaagagctcaataaatagttgttgaaggagcatgtggctgtcaggcctgtgggagggaggattaggagatgagaggccctcattggtctagggatggctgccccatctgcctagggcatgctgagttagtatggggcagcccccaggaggttgggaaaactttcccaaaacagaggtctagatgaaggaggcctggggagagaggggactggctgatgttgtatcttacggggtgctggatgggctttgtgtaaaggcatttactggtgcacatatgctgtgtgtacttttctgtatgtaggttatactttaagaaaagttctgaaaaattggctgggcacagtggctcacacctgtccagcactttgggaggctgaggcgggtggatcacctgaggtcagtagttcaaaaccagcctggccaacatggcgaaaccctgtctctaaaaataaaaataaactaaaaatacaaaaaattagctgggcgtggtgacaggcacctgtaatcccagctacttgggaggctgaggcaggagaatcccttgaacacgggaggcggaggttgcagtgagccaagatcgcgcccctgcactccagcctgggtgacagagtgagactctgtctcaaaaaaaaaaaaaaaaaaaaaaaaagaaagaaagaaaaagagaaagaaaagttctgaaaaatcaaatcaaaggcacatgtccaagccccatgtggaagaatggtcaggagaggcacatctattcatttggtgcacacttactgagccatctactatataccaggcactgatttaggcatattgatgccgtggtgagacagggaaggcctctgccttcattggcttccgttttggtggaggaggagtgggaaggagaaacaaatcatagatgaggaaccaagcatgagaaatgcagaagaggtgactgttacaagggttaataggcggggttatgtgatgtgacacagaggcgtttagccagaatggtcaaagaggacctcctgaggaggtgacattgggcaaagacctaaatgatgaggagtcaccatggggctagaacagtaaagagcacagcctgtgcacagctcccgcggctggaaggagccattcaaggaggcctgtggaccaatgtggagagaggaaggtggcaggtatgaatcagttctaagatagcagaggccttgaatggcaaggtagtgagtttggattttattctaaatgggaaaccaaaaacaaaacagtgactttgacctcctttctaccctaggtctgcagcccagagggcaccttctgcaaacatgtctgtggatcccctatccagcaaagctctaaaggtgaggaggcagcctctgtcaacccagtgaagccctccctccctgcccatgcagagcctcctcatcccaacttccccttctttcctggaatcccctgggtggctcagcaggcaccaggccttcatgatgccaaagggaagggccacagccatgggctgggaccaggaggcctgggctctggtcacaggctgcatgtccctggggtaggtcacttccctctccaggcctccttccccatcgggtcaatgtcccctggggcattcaaaggtgctttccgacctgggtttctctggctgagtccagggcttggcgctaggttagaattcaggctgagccccggggtggcctccttttgtgtcccgatcctagtctggcccggtttccccttcccggattcctgctccccttcggggttttggatcaagtccacccaccacctcggcggctaaggcggtgaaagaggaacaccgcgggtggagcgggggggcccgtccccagtcccctggacctcagtttcctcatgcccgcagatcaagcgagagctgagcgagaacacgccgcacctgtcggacgaggcgctgatggggctgtcggtgcgcgagctgaaccggcatctgcgcgggctctccgccgaggaggtgacacggctcaagcagcggcgccgcacactcaaaaaccgtggctacgccgccagctgccgcgtgaagcgcgtgtgccagaaggaggagctgcagaagcagaagtcggagctggagcgcgaggtggacaagctggcgcgcgagaacgccgccatgcgcctggagctcgacgcgctgcgcggcaagtgcgaggcgctgcagggcttcgcgcgctccgtggccgccgcccgcgggcccgccacgctcgtggcgccggccagcgtcatcaccatcgtcaagtccaccccgggctcggggtctggccccgcccacggcccggaccccgcccacggcccggcctcctgctcctagtgcccgcccccgccatgcctcagccacgcccctccggcctcagctccctccccaaagtgcctgagcgccgcctctgtgcccaggtcccatttctctgcagcactggccccttggtgcacacacattcccttcgtgggccctgtcttcctcttgcagccccccaaactgggaccgaatgaccctgggaaggggaacttgggtaggttggggatggggcagaggtctggatctgggatcgcccttggctgaaagtttagcctttttagattgagagatacagagccggcttagagaacagctgttgggggagaagagggcacccctcatcttggaaactgctcttattgtgccaatatgccctccaaaccctcccaggattcaaagctaggtttggctgtctgtgacttacgggaccgtcctgctgagaaattgcactgaagagatgcccccacctctggttgggcctgggggtgcctggccttccgaaactaaaagagtgggtgggaagactagtgaaacccagttcacggatggggaaacaggcctgaggtcacatttcacttagtggttgtgttgggaccaaaacctgggtgtcctcactgctgccctgagtccagccatggttttcagggggacagtggacagggactcagaaatgtggtgggagggcctccctggcttgggagaccgctctctgcaagggagggggagagaagcagagggagagagaaggtgacacggatggaagagtgggaaggagctggcctggctcagccctaggctgtccctgcagccagggtgtccgggggctggccagtcagagaaagggggccatggactgctgtggcaaatagggagacaaggagacagaccctgcagtcctactacagtctggagtggggtcctaagaagaagggtcccacctcaacccctgtcagtgtccactgtggggtgggggctgacccctgcctttgattgtcattctcctgggaagcccagtctcagtccctcccccaacactgtccacactgcccctccccactgtttatttattgcacggatctaagttattctccccagccagagcccgagctcctgctccctgggaaaagtggcgtatggccctgagctgggctttatattttatatctgcaaataaatcacattttatcttatatttagggaaagccggagagcaacaacaaaaaatgtttaagccgggcgcggtggctcacatctgtaatcccagcactttgggagtccaaggagggggatcgcttgagtccaggagtttgagaccagcctggacaacatggtgaaaccccatctctacaaaaaatacaaaaattagccatgcatggtggctcatgcctgtagtcccagctacttgggaggctgaggcaggaggatcacttaagcccagaaggcagaggttgtagtgagctgagatcgcaccactgcactccagcctgggcaacatagcaaaatcctgtctcaaaaaaaaagttaaaaaatattgcccggctcctagaatttatttatttcctgacttacagcaagcgagttatcgtcttctgtattttgtagactttctaaataaagtcaaattctttctttttccacagagaataaatgtgtatcctggactatgttttttggcgaggggtgtctaaaatggggttctgctttcaaccccttagggcttctggtggcggggagggctagtgcacatcaccagctattgcacagggtatgaggtggaggggagatggcgacagagaccagtgatgctgaaacttcgatgcttcctcttggttgcttagagcacaggagctcctgggaagacaaagccatgggcacaatgaaatttaggactggattctggcggagcatggtggctcacacctgtaatcccagcactttgggaggctgaagcaagaggatcatctgagactaggagtccaagagcaacccgggcaacatagtgacaccccatctctacaaaaaataaaaaataattagccacatgtggtggtacacatgcctattgttccagctactgaagaggctgaggtgggaggatcacttgaggccaggagtttgagaccaggctgggcaacatagcaagacccccatctctacaagaaatttaaaagtaagaaaacaggccgggcgcagtggctcacacctgtaatcccagcactttgggaggctgaggcgggtggatcatttgaggtcaggagttcaagaccagcctgaccaacatggtgaaaccccgtctctactaaaaatacaaaaaacaacaacaacaaaaaaaaaacatggcccgggtgcggtggctcacgcctgtaatcccagcactttgggaggctgaggcaggcggatcacgaggtcaggagatcgagaccatcctggctaacacggtgaaaccccgtctctactaaaaatacaaaaaacaacaacaacaaaaaaaaaacatggcccgggtgcggtggctcatgcctgtaatcccagcactttgggaggctgaggcaggcagatcacgaggtcaggagatcgagaccatcctggctaacacggtgaaaccccgtctctactaaaaatacaaaaaaaattagccgggcatggtggcgggcgcctgtagtcccagctactcgggaggctgaggcaggagaatggtgtgaagccgggaggcggagcttgcagtgagctgagatcgcgccactggactccagcctgggcgacagagtgagactccgtctcaaaaaaaaaaagaaaaacaaaacaaaaaacagaaaaacatagctgagtgtggtggcgcatgtctgtagtcctggctactcaggaggttgagacaagagagaatcgcttaaacccgggaagcagaggttgcagtaagctgagatcgcgccactgcactccagcctgggtgacagagcaagactccatctcaaaaaaaaaaaaaaaaagaaaagaaaagaaaagaaaacaattagccagtcatggtggtgtggttgagcccaggagtttgaggctgcagtgagctatgattgcaccactgcacaatctaggtgacacagaccctgtctcaaaagaagaagaaatttagggttaaattccctgggcatccctttagtgaacagacagtcccacccagagaggaaaaaacccagatttcagagtaatttttccagcactttcacattgagatctgattttctacagccaagtggaaactatcttccccatgtttcggaatgcccagggaggcagggagagtggctttcccagcccccacctgcaggcctaaaccataaccctgtgtcttgtcctaggcctcaaactcactaatttcaacccaatctgccagcccttctggggcaccctgaagaaggagtggagtatactgtggtctgtgggtcacggcaattggggtttgaatctaggtgtctgttcttagctgtgggatctttggtacttatttggtttcttacagtctcagtttaccatctgtaaaatgaagatgctatggggcattacgtgcgaaaaaccctggagacctgtggggctgcaggttttaacactccgaacacacatttacagtggcacagaccgaggtgaggccaactctatggctgggtatggggctggctgggtatggggcccgcggggtaagggaccagttgggcgaaggtgcaggatttgagtccgggaaagggccagatcacgtaggtaggccgtgtccacggggctttctccccttctcaggttggggctcggtgctttccctgccaagcccatgaccctgaaatgctgagctcaggcctgcgggaagggcagcaggaagctgcgggaggacgcaggctatttacccgcctcgggaggctggtgggaattcccccacccacaccgcattcctgagtgctcccgtcagcagcaagccaggccccaagaaggcatgcggtaccagagaggccaggcactgtgcccacagccagcggccccctgccccagggtccctggccctgagggtcccagggtggaggacagtcccagagacgcaggaagctcgtctgaaagggggatcccaggaaatcctgggagatgcctgcaggagcggggctgccagcatgtgggccccatggacctggttgaccaaacagggaaggagcatcgaccgcctgcggcccggccgtcctgggttgggaactggctggaggttggggagaccctttgtccaaggggggcctgggccttgaccttggtccctatcaatccgaacccccatcactgaaaggttacacacaggaaggagagggtttcctaagccgcctgtacccacagccactccacccaccccaaagccagagcagggggcagggaggaggaaggaaaaacctcacccacaggcagagatttcaatacaatctatattatctcatatatagatttcttcctcactttatttgctcacttctgtcacgcatttaaaatgtcacagagaccaaaatagagtggctttctggtggaactcatggcagtcatacaacaagatacaaaactaggagactctgtcttctcatacatcatacaattaatttttcaagtattctttatgtacaaagagctactctacctggaaagaaaattaaaaaaaaaaaagacaaggtaggttatgcatcctaaggaggaggaggggatggagcggtcgggcacatgttcccgtccccacgaccccacggaccgctgattccctgccactgagctccccccaccctccacgcaaacagcaacgctgggcaggcgaaaaccaagggagtgggaatcagcagcactttggcctggagggagaagggaagccacggtggagagacagcttggtgaaagcagatggcggggcagggccagggctggtcctcagcctgtgtctgcacccaccctcccgggcagcttgggcccaactgctccgcccccccaagatggagggggagagctggcctctggcacccacatgcaggcctctgccacgaggaaaggaaggaggccaggaagacggctgggccccaactctcctcacaggtggcagggagggaacctgttcattccaggaaggaccaaaagaaagaatccccagtgaacaccggcagggtccctctcccttaccctaccagcttctccaggtgactgcagcccaaacccagggataatctgggttttaaatgccaggacactttgcctgtagggacacgtgttgtgacacgaggctcttcctaagtcaggagctagtataagcccagcctgctgggggttccggaggccccaggtctagaggtgtggagggggagaggaggggcttggtggtcctgaccactcctgaggcctgtccaagggctctgggcccagcactgcaggatcctgcgagtgccagcagctgaactaagagccccagggagcgtgtgggacagatggggagccagggaggggcgctttcatatgtgactaaggcacagaagagatgggccaggggccagatggggtagaacaccaggccctgtgtggataggggccccgagaggagtctgggaccattccccccacctcccagctccccactgtgtggccacccctcccggtctccctgccggactgccttcccccagaagctggtctgaaacgtggagactcagacctttcccctgaaacgggagggagaagccccaaagagagagaggacccagcatcagcctgggaaggagggctgggagcccctgagccctgaagcagccaggaagcaagggctctgcccaaagctatcgaggaaggacccaagtgagccggcagtgcgggctgtgggctgtccttggtaggccagggggaaggggcatgaggcaggcagaggtgtggccacgacaggtggggatacccaggggcccagaagcccctgcttcaacagaagcggtgcccaggggccctgaatgcccttcctgggtggggcctgtgactcctggtgtctggctctgatccttgcagcatgccacagaggcctgggtcaggaggggaggaccacagagcgcccacatccccactcctgcccggggtgaggtgaatctagcactggacaaaggtggacaggggagggatgcaggcgggaagagcccaggtcagacagggtattgcacggtgtgtgggggagccacggcttgccgacctcagcctgagagtctcgcggggaggaggggctagaaggctgcagccgctggtccacacacaagcattggggcctgggtgcggctggtcccagcatgcccccagcacaggacgggcagcaggggcataagccttgctcccagtgtcctctgccctcgcccgggcagtgcaggctgggccatgtataaatattcctgaaggcccatgggcgagcctggctgtcccccgttcctctggaagtgacatgtgagtgtttctggtccaataaataaaggcggcgtgagcactgtgccagctgcctcctggcctggtggtgaggctggaggtggggcacagcctgaccgtggctatggcgccagcacttccgccactgcagcccgcacctagaattcatcatcagagctgagcaggagagtcttctcgttgtcgcgggcgccactgaggctgtgggagcgggagaggccgtgggcgccaccacgccaggtgggcccaggctccagggtggactgctgcgtgtactgctggtaggcaggtgagaagttgtggatggcgtcctgcacgatgtcgtgcgggttcatggtctccttgaggctgctggagatgctcttcatgggggcacagcggcctgccgggcagggagcgggaggggcaggtgaggaggctgggacggtgagagggaggtggctcagcccctgcccgtgatcctgggacagacaccccccaacccaaagctatgcccttcaaccatcccttctgggacagagaatggggtccaggatatgagaaggggcaggaaaaaatggacttctttggctggggagccccaaggggaggctggactgtgaagaggagcagacataaacccccactgggagctgggctggctgcagggaagggacccagggtggagactggcaagctatgggcagtgagcctagaatgccccagagaggccagagcaggctcagcactgactgaagttggggcatgtggggccagagggcctggaagccaggggtgcccggttccacaggtgccaggcgcgtcccccaccaccgggggaagtgctgtgctccctctactctggagatcaggaccaggctggcctgcacccccaggggagcagatgcgactcactggctccctctaagagggcttcctcctcatctctctaatcaactgtccccatcctcaggggctcagagcagaaaggtggcccaggacacctggatgtaagggacgagcccacccctggaacccaggattcctgactcagcttgtgaactcttggaaacatcgtgaaatgccccgatatcccatgaacagcactgtgcccccagaagaaggcggggcatattccagaacgagaaacgaggacggaagcaggcaagctctacagagggtggcccttgacaggtgctctgggcgctcccacccagggggtgccggtggggaggagatgaggacacggagaagagctacagagagacgcatgccagtgacagtgaccagaactgacatgcaggacagacatgcagaccaagagcgggacctaccgtaagggccgtatgttggcactgcccgcggccaaaccccgggcaaaagcagggcaaggggggcggggagagaagccaaagaaatagagaagacaagagacagctgagtgaacaatgtgtgcccaccaccgaggcccaccagcacgacacaccacacaccctgtccccacccccccaggccccacagggcacccaggaagctccaggtgcctcctggggcctggcaggggggatatccacctagggatgactcctcccctggtgttcacgccaacaggaaacatccgtctggcgactgagttccgcctccacgtctaggtcaggacgtcccatccccacttcttccccggctagcctggggccacatccacacctcacattttacaaacctcacaacacttcccagaccaggacatggaggctcagagggaggggttacaatcgcacagctgagccagctctgcacctaagcctatcctgagggctgagggtctgggcctgggttagagggtagcagggggctcaggaccagtggggaggcagaagagggcaagcagcttccccggccgggcgtgggtatgtctagagggacagctcaggccaggcagcagagcccctctgctgagccccagtggtgcaggaatggttctctgccatgggcccccttgctccttggggtggccccaggccccaggcccaaggatgatgttcccacgggcacagggtataccacaccaggtccaagggacactgccctcaatgctgggtgtgtgtttgctagatccttccaactgggccaccaggtggcaacccctggcctttgtgcacctgctctttgggcacagagtaggtcttcccccaccagggaaggcacagagga

SEQ ID NO: 852 - DNA, 185371 bp, Homo sapiens
  Genbank Accession No. AL022726
gatcacttgtagatctcagtgggaaatcagaacagcaatgggctcagacaggaatcaccagtgccaagaacatttttttttaatttggattaataggtggctggaatgaaataaagtcatatttattaagaggaaacaattttctcttctctcattgaatcccataatgggatttttcttgttttcccaaaggcctccttgttcttcccttatcatagcgaaagatatgtccctttgttcccagttcctaaattcctgggctgtttctgaggattcacacgctgcagctaaacatttagtggggctttacaacaaaaattcgatgttcttgcttaagtgtttgtctggtgaattagagactagagacagcataatgactccaagagcaattgtaggatgcttgaacaaaacaaaacacgttatgttgctactgtttccttaaacctagaccacagaattccagggaaagaaaggatttgggtatcaaatttatccctccctcattttccatagaagagattaaggcacagaaagtgaagtgagaccttgtactttacgttcactttttcttgaggaaaaatctctctttatttggtgatacagaaggctgactttgcaaaataaataaaatataaagagatcagttttaagactgttgaaaaacaaccctgttgggttatccttagggatcctctctttgataatatataagtctctagtaactagaggtgctcagaaatatttgttgaatgactaaactaatgaaagactgagtttcgtattgctattacagataagttcgtggacaatggtgatgtacgaaaatgtgtgaaatcgtgttacatttcaaaaggaaaaggcaaaatagtatgtgtccaacaattctaaatgtgtacgaatgtgcttaagaatgttaccaaagcacagaatagaatttgaaatgacggataatttaaggttttctaaaatgttatttaaatttatgtgagaatgaatttggcttcaggattaagttgtttgctagcttaattgcaatgaccattgctttccttcacattttctcttttcattttgcttcagaggcacatattgagggcaaacaaactcactgggacaaactttgtgacgttgtttttgaggagcatgaaagacatttttgtgcagaacccgggtacatatgttcatctggtatctgtccccaccagcaaagtaattcatggcctgacttgttagctgcctttctaccctttgacactccggggaatggttcctactacgaggcttgtcagatatgctttcccctgagtcagctcagagcttgaaggaagtagtgtgggaataagagtatctgctggaatcacaactgatccctgtgtcagcccagatcaggtcctgggttctgctagaccaaggagggccttctgtgagctttcttcttatccagggctccgtttacctcacctgttcaaagactcatttatagtcagttctttccattcagatgctaagccaacgcgaaaactaaaacgacctttacctaaaatgagccacagtcaaggaagctttttaaacaaagcgaggcactgttaagaaattaataattgtggagaagaaggaagggctcagtttctaaatactttccatgttagatatggtgggtgccctggttccgtctgcttggcatagggctgtctatgtcataaagatgaaatggggtttggtgggatgaggacccaacaatgcttgagagactggctgggggaacagcctccaaggcagatccattcaaccgcctcagtcatttcctatttttaatattaaaggaatatggagagaaacgggacagaacatagcgttctgggaaaccagtaatcaaacggcctaaagctaatgtttactttttggaatgttttacgaaggcattacttggagatgtaaaaaagagagagagagagcacctaataatagcctttcagtcgcagaaagagaaaagcagcacagacatgataattgaatttggtttggatggtcaaaatctgtgtgatcctacagctgtattttctaaaccatctgcttgacttttaatacatgttctacgttttgtttcctttgcccattgctgcatttgaaaatggctaattaccttacaagcctgttccattttcctttgcttctattttttttttctttccctcttacaaatgaagatgcttggccttcattacttctcagtcctcagatctctcaccttatcctcaaagcaggccaacaggggatttgggtcaaagtaaaccctgaaatagtttttgtggaaaaaaaaatgagagaaaaataaataagtccagcttcatctcccaggaactgaggttgatgtctgtttgccctctgccccacataattaaatctggtgcacaggacaggtaaaccaaaggaatggcagagttttcgtctcatttcaagtttaaatactactggacttctgcagcctggattccaaagttgtgttataattttacttataaattctgagtcctgattatgttttttataaacatgtatgtccccaagccctttttgaagtcatccaagagaagaatctctatgtgtcccattagaggttcatttgaccttggattgctataaagagaagtgccatgcccttgctataatttaatagtgctctctaatgtttatattatgagttctggacatctgggaactcctaggatgagactggaattggaaaattggccccatacatgtggatttgcatagacttgctatattaagaaaataaaaaatctattttagttggactcataaaaattagttgtttgtcttcttttctctgtgttttgacagaccagaatagtaactcttaaaatttacataaaatgttcataaagtatttttatatattttctgttatttgagctacacaattgccatgtgaattaaggcactaactttagaatcctgaggcttgggtaggtaaattgaattactcaaggaaaaaatggctaataagagatagagctggaacaaagagccattcatacattcattcactcattcacacacagtcacgcaccgcatagcaaggtttggttcaaaaatggaccgcctacatgacagtggtcccataagactatgatggagctgaaaaattcccatcaccagcctccagggccatgaggataagtttctgtcatttaagtcacccagtctacgataatttgttatgatgaatacactcacagtgaggaatgaggatcatgattcagagcgagactctgagacctgacttcattttgggcaaagcctggcccaccatgatctgtggtgggtacaggggagtggtatctctgaggttttcagcttctgtgactgctccattcccactatcacatctttctgggtcctcctaattaaccacctccttacagggagcttagctaaagttggcatctttctgtgcagtggggtggggataggcccccttctctgggctggaggggaaggcagttaatatctacctggaagcccagcagagcctggggcccacattgaaagctgtcagtacccatcagtgacctaacagaattctcactatcttcttttaatgggtagaatttgggacatcttaaaaacaaatgacatttaatctatacacaattttttaaaagcctttattttcactttttatatctgagttctcaactatcttgagggatattctctttaagggaatgcagtggcctttctgggcacacataatttcaaaagaacagcagtttcctttacttttataaatttgtttttctttaatttttataagtccgaacagttttttgcactttcagtcttaaggagaatgcacaataatgaattgtatctttgtgggaagttaaagtctgtagccaatttcttgcggtcattatttggaaaatttcctagaatttagacagtttgatgatattctcatagagccatgaagccagtttcaaacagcttttagccccattaaattgttttaaagcatgtcagttctcctgtgtctatcagatacatgaaggccggggctggcatctatcctgttcactgtcctgtgctctctgccctaggacttattcaatgtttgttgcatgaataatagaaattgttcaacactcaatatcaagccagtaaaataagaccatttcctccttaaacacgatgtctttgagaaactctgggaatcttacatcttctagatggagttactcttggaatcctggaaatggccggagagactgtcatacattttcagagaagtaagcttgacctccacaaagtgcatcaaacaaaacaaaatgaaacaaagaaaacaatagcagaaataaaaggtgtctctgtagctctttgtctgcagagatgctttgagatccaaaacagtttttctccaggaaaacagcatcaaggccaaagtcctccttttaaagccatagaggaaatgcatgattgtcagtaggagagcaaaactctttggagtgggtttagaggcagtcgcagactggggagtttgaattgacaagttttcttgaattgagtcatccaaaggtgacctgtctcatcttgtaacatgagacactcctggtctgtaaatgcaaccctgatgaatttccacaaggatcagtggagagtagaggatatattcagaatgaaatgaggtagtaagtgggttagtggatgcaacacattattctgatcttcataagtaatattctgttgatcttatttttcttatgaaaggaacttcacctctgcccatcacctcctacttctaagagagttgttttgtctgctctataaatgaggtcatggtgtatgacgaaataaccaataattcttaaatacctctgggattttctattaactagttttcctatctggcagggacagcttctgtgggaaatctcttaagttttatgggaatttatttgggatatttttatgtttaatgatgatgtggacaaacccagtatgttctcatggtttttattctcaagtaaaagaaaaacgtaatcatttgcagtttatcagatattctctttgactgagacaaaatttcatttgatattatagtacccaagagtatgcttcatttgttagctaagaacacatgctcatttgatttatcattttctgacaagtaaaaagctatatgaccttcttcagtggatgactgggaaaacaaattatggcccattcaaacaagggaatacaattcgacaatgaaaaggaacaaactattgattcacataacaacatggatgaatgtcagatgcattttgctaagtaaaagaagccaggcccaaaggtgacataatacacgattccatttatatgacattctgtaaaggcaaaaccaaagggatgaaaaacggaccaatgggtgccagggactgggtctggggaaggatttgactataaacaggcagcatgagggaatctggggggcaatggaactgttcttattatgactgtagttgtagatagctctaggaatttttcaaaacctgtaaaattgtgcaccacaaagaatgaattttactgtatatgaattaacaaaaaaagcctgtgtaaaataaatctagaattaaattaaacattatcaagaaagcagggagcattgtgtgtcaaccatttgaactagttgaagcacaccaagaaatacatagactaatgtggtgttttctgaactgtgttctgtggaacacaaaattccctaatctgtcactaggagtcgctcaaagagtattccaaatcattcttcaaggccgggtgtggtggcttacgcctgtaatcccagcacttagggaggctgaggcgggcagatcacctgaggtcaggagttcaagaccagcctggccaacacggtgaaaccccgtatctactaaaaatacaaaaactagctgggcatggtggcaggtgcttgtaatctcagctactcgggagactaaggcaggataatcgcttgaacctgagaggcggaggttgcagtgagctgagatcatgcaattgcactccagcctgggcaacaagagtgaaactcactctcaaaaagaaaaaaaaaaaaaaaaaaaaagaatcattcatcaaccaaaagattctgtgtcaaatacatttggtaaatcttgcattcataatcctgtccttttctggagagtcgtggtatatatattaagattgagagatgtcctgcagcaaaaaaagaaaagcaaacaaacataaacaataacaaaggtttaactttaatagtctttgaacttgtttgaaactgttattcatggaacatcgattaacatctaatggacagggtttgagaaatgcgaatcataacaatagggtgacattttatcacagaatcacaaaatcttagtactggagaaagcctcaggaggtcatcttgtctttgggacagacatacaacttagccatctttttatagaacatagtctatttttttaacattcagttcctagtttcagctgttggtgggttttttggtaatacattccatgcttaacaattttctccagcacagtactctttcttagattcctcctctaatgtatacctgttttctctccctctctcttccctatgtgaagctttaatgcaactcatcaccatggactgccgtaccatgagcttgtcttagagagtagtggataccatgggggtggctcacaaagaaacctctcagctctggcaactgcacctaaactacagttgatgctcagctgccatgcctgtattgcatccttgttcctgctcttggcctcacaattgatgcagggctgaccagcagattcttccaggagcaagagagaaaaacctgggaatggtagacttaagtcaccataacagtagggtttcagaaagaaggcttatagattctgcccttcctggaacttgttttgatttgtttgtttgtctcagctttcttttgcattcagtgagttaccccagtatctttaagtaaatttcatttatagctaaaggcagtttctgttacttgcatcccaaagaaccttaactacaatatcttatctgtcttccagcagtgtctagtggcaaaatggtacaaatcctggccaaattttccagattgctggagaagagtactagggatatgaggatccattccaatttacctggagattaagtacaaaattggactcatgctctgttccttcccactcacccacatcaggtccttattccctgcacctggggtccttctgtgttccctctagtttctaggggccagagggggcttttcatttaagtccgccctagaagagctttcatttttacttagctctcctagaagtagaatggtttcatctaatcatttttccttgtaattcttcttttctaactttttagacatttccaacttctaaattctctcccaggcccttcacaccacactaaatagttaaagaagtgacttagtcatgtagagatgtgtatggaattctctggtatggagaccaagaaaggccttaattttatttcgacatctggataggtgcatttaactaaactatgcatgttggaatggttccaaagcacctgagggtagttgcagtaccttcgaggtttgcagtaatgcaaagatttatatgcagcatttaccccatgctgcttcagagtgttattctttttcatcatttgatttatatacttgctcaaagtttttccaattgtaggtgcagtctctgtgtcagcctctgcacataagcagctcagaggacataacttgtctttcacggtcccgcaatgcccagcacaacgtcaggtataggaacagggttaaggaactatcttcaaaatagtcattgtgtttgcaaagactaaaacatagcagccaaaactatggcaggcgcttgaggcattgcattatcaagcatcctggtgcttcacaatccttaaaagtaaaacaaacacacactcatgtacacaagcaaacctctttagatatggcaatagctttacagggagactttaaagaaatctaagtaatttcagtgcaagttttttagctcctgctgtgaggctcagatatgccctgctgtctttggagtgttccttcttccttccaccctagccaggtggaccacactgatgtttggtgatagtgccaggtcctggcactgcatccccctctgtgcctctccatccgcttctcacctctaatcctccaccggaatgacctgaagaagtttcataatcctgccaaggatcatattttgaaacttcgtgggaaattagccgtagtgttaaatttatatttgaactttaagtacttaagtgggaagaaatacaaatagatttaaatggtcaaggaaatttggggaaaacggttcattttgtaatataaatggaacccagtcagaggatgcctttgaagcttgtggatagacctggtcagttatctacagtaccattcctgtgctatccacatgccaacctgatggcccaggaggccagggtgggagacttgcactcccaaccataagtcccctctgtgtgtgaggctgataggctttgggccattggaggatcatttttccttttctgtggtaactgtggtgccagggaggagtgatggcctgtaccttccctaaatcccaatgttttggatgcccctttcctctgctcttgcagcactgagcgctcactgccccaaactgaacttctgtgcttgttgggattcctgacttgacctcaagccctctgtgggcaaacttgtgagttctttgtatgactggtggctaccttaaataggcgttcaatgactatttgttgaatgttggtattttcaggtatgctaggctagtttcatcatttagctttatgtattatttggggttgtattattgccagtgctacccaatgaagagaaacatccttacatactttcagtgccccagaatggctgctgtctttattcttaagggttactaggggctaagtgcagagagagagagagagagacagagagagagagacagagagagagagagaacaataggtaagaagcatcccaagaagcatcccagctggtggctcatacctgaaagctgttctttcatggttcattagacttcgaccttgaactggcagcacctctttgacattgagggtgaagctgacaaaatggaaatggaaactcaccaaggtttcctatggaagtgctgtaatagagagcctgggactcccagcttcatcatttattaagatagctgttatgggctgggcgcagtggctcacgcctataatcccagcactttaggaggccaaggcgggtggatcatgaggtcaggagatcgagaccatcctggctaacacagtgaaatcccgtctctactaaaaatacaaaaaattagccgggcacagtggcgggcgcctgtagtcccagctacttgggaggctgaggcaggagaatggtgtgaacccgggaggcggagcttgcagtgagctgagattgcgccactgcactccagcctgggcaacagagcaaggctccatctcaaaaaaaaaaaaaaaaaaaaaaagatagctgttatgtattgaatgcttgctatgtgtgaggcaagaggttaattacataaccactgtcttacttcatcctaataaccctctgaaattattttcatccttcttttccaaatgagaaaattgaggctaaggaagagtgagaaacttctccaagatgacccaacattatttctctgtcccagagcagagctaggatgaactccgacctgcagcaagtcctggaataacatcctttcttttgacaatgtttcactataatgttgaccaaaaaaaaaaaaaaaaaaaaaagatcccagccagggccactgtctgtgtgggttttctccaggtattccagtttccccccacatcccaaagctgtgcatgttaggtgaatcggtatgtctgcactgtcccggtgtgagtgagtgtgggtgtgtatgggtatgccctgtgatggatggcattctgcacagggctggttcccatctggtaccctgagcactcatgaccctgaactcaactgagcagactggaaaaaatgaataagtgaatgagtacaaattattgcaaaataaacgttcataaagcatacaataatcgtatagacacatgacaataaatgatgcagtacaaaagctctcggaggcccaccgtattcgtgattgtttctgaactgcatgcttataggaggggctccttacaatttttgcttggcagacatgaatttttttatctgacccaccaccactacgtcactgtcacttactgattcataaaaaattgggtaaatcattatcttgtttttattaatctttcttaaatgtatgtgtagctcacatttatttcagtgtttaatattaaaactgttttggtctttattaagaagtttgggctgggcgtggtggctcatgcctgtaaccccagccgaggccgaggggggcagatcacgaggtcaggagatcgagaccatcctggctaatatggtgaaaccccatgtctactaaaaatacaacaaaattagccaggcgtgatggcgggcgcctgtagtcccagctactcagaaggctgaggcaggagaatgacatgaacccaggaggcagagcttgcagtgagccaagatcgcgccactgcactccagcctgcgcaacagagcgagactccgtctcaaaattaattaattaattaattaaaagaagttcggtgtttttgtgaccagaaatttgccaagggaacgtcactcttgtttatatcaattagcttatggtcacattggttcctttatgtgattttacttaaagtcacagcctccaagaacttaccagtgacatcaagtgaggattccctgtacagactttaacctctaacccatatacctttcttggcaatggtggctgcttataagttccatggcatgggcaagttaacctctctaagcctcagtttactcaaaagaaatttgggaatggcaatgcctacctcataggtttattatgaggtttaaaccagatgacacagatgaaagtagacatatgatcatggcacgtggaaggcattacataaatttttgtctcctctttagagctgaacatgcattaggcattcagaaaaccaacagagtgatggatatgctggcagaaagacagaggtggcatgactgtccctgatcactgtggagctggcatgggtctggagatgacttctcttgacacttggggcacatgagggtcacaagtgtttagcacctgctctggagtggtttcatgatgtaccatgactctatagccatcactccacacctgcctctcccactcacaagtctgctattcgtgcagaatggacatctatgtgtaagcaaacagacatgtgtttgtgtgtacaaaacacattttcccatcattgttgccaatgtgcgctcactgcagacacatagtagctttgatgccactgaacatttaccttccactaagcatgcatttcacagaggcgaagtaggggctgaatcttaggacagtgttcaagttctagctctgactactctgctactgacctgctgtataatatatccataatttttaaaaaaaggaattcaagttcaagcagattaaaatcctgatttcacttttatctttcccctggggactatgaatgagtagatggggcagttggcccagttttgctcctggaatagcacctaacacatagtggtacccagtgcatatttgtgcagcgaatatgaggatgacagtgatggcgttggaattatctttctaaacatcctcctgcaggcaggcccctagttcaccttgacagcctcacatctcactcagtcactagcggtttctacagaagcccacgtgccattttgattactgacctctgcatgtgctgttctttcttcctcagttgctctcaacactatccacttaacaaagacctgtttattcttaaaggccaagtataaacaggacctcctttgtaaaacttccccagttcttccttggtagaataagctgcatttcttctgctcctgaggtactttgtacctgtctctcttctagtacttggttctgttcctaatgatgttgtgaagatcttgtgtgcatctctccctcttgaccatcacctcctagagggcagggagctttattatttttccagtcctagagcaatacctatggaaaccatttgttgaatgactaaatgagaaagagatggctacagagaggcaatgcattagatcaaaaatgtaaaaaaatagggaatattgtataagagaagatacagaacaaactacgaaagtcaaatgtctgtctttattggcattctttgatcacagaatctgatgaaaagaacacatctcctaaagaatccttttttctctgtatacaacaccaccaaacagataacatttggccttggaaaggcaaattacaggccaggcacaaaagcagctatagctttatcatttagatgcaccctaaaaagaggagagtcaaggagaaggaaattagatcttgagcatttctctagttctgttgtcaaaaaaggaaaaggtaaataggaaatatctgagaagaatggcaaagagatcccaataaaggaactaactttttttttttttttttgcttttagttttgggatacatgtgcagaacgtgcaggtttgttacataggtatacatgtgccatggtggtttgctgggcctatcaacccatcatctaggttttaagcccaacatgcattaggtatttgtcctaatggtctccctccccttgttccccaccccctgacagggagtgtgtgatgttcccctccctgtgtccatgtgttctcattgttcaactcccacttatgagtgagaacatgtggtgtttggttttctgttcctgtgttagtttgctgagaatgatggtttctagcttcatccatgtccctgcaaaggacatgaactcattcttttttatggcagcatagtattccatggtgtatatgtgccacattttctttatctagtctatcattgatggacatttgggttgaaaggaaccaacttctatttggaattttccgagcaaattagatcgataattgtaatatttgaagtttttgagttgcacaggacatggtgcttagtcccttattcgccgagcccttgccctccccagattctacaactagtaatttctacagaggccagcacctgtggtgaatgtgagctcatctgagtcctggaaaccttgggggctgctctggttcattcacactggttcaggaactcaggcttagcaatgaatcctcaggccccaacgaaaccccacttggccttaaaggagacaactggtagaccagatgtcctcacatggattcatatcaaagagaaattctgaaagacagctcaaagctaagcagatcttaatttgtccatattatctttgagatgtgactatcttcctcagcttcctggcagcttgcccagctctctgagggaaactcagttggccagagttcacctgggtttatcaggcctccaggggaatctgttttctctgtgtgcatcctttgttattctgcgggaactgggtcatcttttcaagagtggaaatgtcagaggaataaagaggctcccttgaaaagatctttgccaccacagaaaggaaacatctcagcatatcccttaaataacaacatacagtgtgacagccttgcttccgacccaaagaaagaaaagaggccgagaacactgggcaacatttacacacacccctttgctgggtggacagctggactggggctgtgtcatcccaagcactgaattaaaggagcggaaacatcaactctgtggaatctttttggatggcaaagtaggctagaaagcagacaaaggaaggctttcagcaaaagcctgattttttatattgcagcacgcttcgaacgtaaggctgctgcctggagaagcaggaatctgtgactatctgggaaaagccccatccagactgcagtctcccactcaccccagcaacagacagaaagttattgtagagggcagcgagctgtggctgcaccagtcctttcagttgttctagagagatgccacggtgtgtgaaatagatctcaccatgttaattgactgctagaaagacaacttatgcaaaagtctggctgggagaatcctaagataaggcacattattgaccacgtgtcctaggatttgggttgcatcatgagctaccaaaagactcaaccctgagtcacaaacttctatatggcaaatcccttcccaattacaaaatcattcaccatgcccccaagcttagcactaccctcaggcaaatataccatctcccaatcaatgccccctaacaagcagaactgatcatgattaagacagggcacattgatggtgtgtgctttttagggtctcggctagtgttcttttttcctcttatgaacccagataagctatgacatgcagtactggcctgcttgatccatgaaaagacttgtgtgtcgggattcttccaaaaccttggactaatcctggctctgccactcaggagcccctgcatggccttgaggaaatcactttgttggcctcagctatccctatttgtaaagcccctgacaccaggggctccactcaaaaacatccatgttcacccttctattcactgttaattacattggagataaaacagacatcaagattgcatagacagagcaaataaggggaaactaaggtatcttaacttcagtttagttctcctgagaataagggaaatgcaagatgtcacacaaaattctgcccaggcttgggaagagctgagatgtctgttatagacctttgctccctgcgtgcttgtgtcagcccaccagaacccctcctttcaaaataccctcctcattgtccattcttatcctaagttttattaatcatgaataatgtgctactacctcaataactgaccatctgtgcatcaccgtatttctcaaaccccaattcattgtaagaattagctaaagaactttttttttttttttttttttttgagatgtagtctcgctctgtcatccaggctagagtacagtggtgcgatctcggctcactgcaagctccgcctcccgggttaacgccattttcccacctcagcctcccaagtagctgggactacaggcacctgccaccacgcccggctaatttttgtatttttagtagagacagggtttcaccgtgttagccaggatggtctcgatctcctgaccttgtgatctgcctgcctcggcctcccaaagtgctgggattacaggcatgagccatcgcgcccagccgagctaaagaactttttaatggtaaagattctgggctgcagcttcaggatggggtagggtctgcacacgtccgatggttcagatgtttgggaattattgctgggcagcaggaatgtgttagagtcatatcagatcctaaaacaacttgaggggtgggaggtggaacacggcagcagtggtggtgctggtgtgattctatgaaaagtaattccatatgattctgatatgctccatctcctgcaatccctgctccctccccccactccccaccatttgagaattattggcacttgggttggatgaaaaatgccttggactaatcctagctctgccactcaggagccacacccccctactccatggccttaggaaatcactttgttggcctcagtgtccctatttgcaaagtaaaagcattggtccattcagtggttgtccaatgtcattgtgtatcagaattatcaggagagtcttaataacacatcaatgcctgggccccactcacagaggttctgacctaatttgcctggcatgaactctgatttggagtatctgtccagctccccaggggatactgctgtggggacagctctgaagttgtatgattagagtcctcacttttctggagcactccacaaatgattggcagccttccttctgatgtgtctacaagactattttgaagtccttgtgacagagttgactagctagcacttgactcaccatcttggaagttaacattaatagacaatagaagagttgctttatttgataagcaatgaagcaacaaagtgtttgtgatcggtaatttcatgtgtcaacttggctggaccaagggatgcccagatagctggttaaacataatttctgggtgtatctgtgaggatgtttccagaagagataagcatttgcattagtaggctgagtaacaagatccaccctcagcaatgtgggtaggccttatccaatcccttgaggccctggaaagaacaaaaagataaagggtggattcactctctctgcttgagctgagacacatgtcttctcccgccttcagacatcagcatttctggttcttaggctttcagactcagaccaggacttacaccattggcccctgattctcaggccttagaccgaattataccattggcttttccggttcttcagtgtgcagacagcagatttttatgggacttctaggcctccataatcacatgagccaattcctatgtctcttcttatataaataattatatatgtcctatccgttctgtttctctggaaacccctgactaatacagtgctgcataggtttttctgatccactttaatacattaaagattcatgagcagtgcagtttttcctgaagcgtttctcataggataattaagccatattctgattctaagcccactttttctcaggtggcaagtgtcaccactaggtctgttatggtttacgtatgtgtgtgtgtgtgtgtgtgtgtgtgtgcacacagcgactttcttgctatagaataaactgtctcccgagaggtggggctccatcagggcctaaatgttttacaccagggatgacttcccagtagttttctcaggttaggatactagggaagaattaccaagtacagcacttactgttggttgagtatggctttaagcactttattttttattttatttttttgagacaaggtcttgctctgtcacctaggctggagtgcagtggtgcaatcacggctcactgaagccttgaactcccgaggctcaatcgatcctcccaccttatcctcccaagcagccggaactacaggtgtgtgccaccaggcctgcctaattttcgattttttttttttttttttttttgggtagagataggatttcaccgtgttgcccaggctggtctcaaactcctggacttaagtgatcctcccacctcagcgtcccacagtgttggcattacagatgtgagccaccatacctggccaagcactttaattaataacttcagttatcctcacaacaatcctgtatgctatatattactaatattcccattttatagatgggtacaatgaaaaacagcacattgcagtaacctccaaagttacctcgtaaataacagagacatttgaactcaggcatgttggctcccgaacctgtgtcctttattactaaaaaacattgcctcccccgtaatcagtagcttaatgtttgtaataaaaactgaaaacaaatccaggctttatcactgctttccaatatcttggttactctcagctattctcaggagatgaaaatcacaaggcttcttaacaaccagttttgcccttgattttctgaagagtggaatgagatgcaccagctgtgagtgagaaccttttgtgcctgtgtacttgcaaatttatcatcacttccctgtttctgtgtgaaacctgaaccagactgtggagcagctgatctgctctctttggcccacttcacaattcatacctgtttcgaggcggctggatccgcctgcgggctacatccatcacaaggcggctgctgtggtgactcagccgggctgaaatccggttcttccggccgcatgtccctggacatctgcctgctggaaagccaagacaagcaggttcacacacctatgttcactgatgtgagctgtgctgttaccttatttttattattaattattattttgaggcagagtctctctctgtcaccgaggctggagtgcagcggtgtgatctcggctcactgcaacctccgcctcccgggttcaagcaattctcctgcttcagcctcccaggtagctgagattacaggcgctcgccaccatgcctggcattttcttttcttttttcttttttctttttcttttttgtatttatagtagagacgaggtttcaccatgttggccaggctggtttttattatttttttaattcagaaaacttcggcgttctaaggcgcaaagtgacattatttgcgcgtttcctattttatgagtttttgctccattctttgcactgtggacccaaatgcagccagcagcagcactgaggatatgataatatattactttctttttcttttttctttttgttaacggcaccatttcctatatgtcccattaacttaaaagctccatatgacagcatattatcattttataaagtgcatatttttcttgtttctttattatataagtcataaaatgtatagctggtttcttactgaaaataattttacgatgtgttcaactgagctagggaaagctggttaatggatgatggggaacatggggtcattctgtgaaagggagcagctcaaagaactttgcaccataaaagttaatgagaaaaagtcaagagttaggcgtgtgcttacgtgtaaatcttgatgaactgtgcattaatttctctcttgggtttaggcatcatttggtccagagagcagctatagaataaattcacgtactattattcagaaatttgtcacttttcctttcagatgtgagaggtttggatctgattcttagtcaatatcttcaaaagtaggtcgagaacttattagtttgggtaatagtttactgcacactctgaacagaatccactggggaagaaaaagtttgtaaacatataattaatgtggatggtccctcatagtattacatgtttattacatgtgcaatatatattacattacctataacacgtgtagttatggcatagacacaataaggtaaaagataatattttcccaattagactttatcttagggcccctgcactggaaatttccccgcattggaatgctcttccctccaagtaggaagcatggattcctccttcagtcatttcaatcataactcaaatgtcatctcctcaaagaggcccttcctaccacccatttaaagtatccactgaacattcctcatcccattaactatccatacagtcactatcgcatatccgacagttttcctgtttatttatttaatagtttattgtctgtctccaccctctagaatgtaaacttggtaagaacaagaccttgtctgtcttgtttactcctgtaacccagttccttaaagagtgagtgcctggtatacagtgggaggtcattaactgtttgctagaaggaaggaaaggaaatgggaagaagggaagaaagaagggaaaaaagagagggagggaggaagggaggaaaagaagaaggagaaagggaagaaggaaggaagaacagatggacctgagagagctgagcttaggtattagatactaacttgcataaccaggggaagccaagagacgtgatttgagttagatcttaaaagatggcaggggtgtggtttatggctggtaggaggaggagaaacagatttttctagttagaatctctgaacaaccagttatactagagagagtatgagtacgcactgggtgttgtcccaggttcagaaaagatgttataggcagtggatttagggaagtggcaggttatagggactttaaaaaatgtaactcaaggcttatgtgaaattgtaggaagcagtttgagatgaggagggggatggattaggaagtaatctgaagcaaactgaaggagagacatagtgtgatcaatgaatgccaagaagattggaagtgtctctcaatcatttgtataacaccgttttgtaaagctgattgatagatggacagaatctcagtccgggacatctgctagacatttggtggaaaacgggctctcgcctcccaggctgggaagagactgctttcatgtgggtactatggtgggatagctcattctgcccttgctatttggagggtagaaagtaccagggaagatgtggcatgggcagagttgaaaggtaaaagatggtgggaagcttggaatgaaaattgttttgttaaaagcatattgtcagaaaaatacaatttctgtgatataattattctaccctttctagctctctgtaatttactgtatgtttcttgagataggaggatagtgtctcttgatcatttgaaaaatccaggaagaaaatggaaaaggccctgaaagtttagatacgcagctcttatcatgaactgttcgaggatattgacctgcagcgtatgcagaatttgaagtagctttcaaaatcctgttagttcctttaagaatcaggggtggtggtagggatttggcattgcagtttaaagatgcatgccatcactgagtgggtttttaacaagtggtctttgacttccactatctcatattgtctcatacctccaccttccatgtggtctgtcattatggattccgctgattctcattcttcaaatccagatgtagctattagcctctaatccaggaaataggcctctctcttgtaatccagttgattctcagtgctcttctggcatctggccttctccactggattctaaattgccctgtacattgactcctctgtcccaaccattttatagctgctctcaaacgtgactctaccctggcccatcatttgctaccagaagcccaggggtccccttagaatccatgtgtgcactgatttagcccttcctctgaacttggtagtgaagatagtcatttaggccatagactcaactgactgtcaattccttcacacattttgttctcaatccagtttattttggcgacgaccatttaaagagtctcctctcttgtttcctttgtcacgctcccctggacacagaagagccttttctgtcaagaacagcaagtatcagcattgttttctgaaccagtgtagtcttatcttcatacctaccatgaaaagccaggaagagaaagaaagtaacctcttaaacgtccattatcatagtagcagtttcttttcctttatgctccaagttggaaggttgctgctttcatctcacttggattagaatgaaattatttacattagctatgctgcatctccaaaattagttaatggtaaacgtcacttgtgtcacaaaaaattaattttgtgttcttctgaagttatcttcctggctaaccattgtgcagggtgccactggcattggctctgggagcggggaggggaagccatgctgccttccacactggggccttggcaggttgcatggtggtgcgcacaaggaaactgaaccgcatctgcatggctcactgcttatcaggagcgcacactggctgccatgctgtagggcagcgaaggaaaacaaaacaacaataaagggaggcctttgtcatggattaaaagggtttagaaacatctgagccatgcagttttcgaacactaacactgccaatgacttcatgacaaaaatgctagaaaatgtgctaactgggttagatagagttggtggggccgccaacactcatgcttttgttaatggcctcttatctgtgtgagtgtgtggatgcacagttcacagataaagttaccttttgtagaatgagaggaatgaggttaatgacgttacagtattgctgcttgtgattgcagctaagggtgtccctaaagattgtcattcccggacaaatttttcattttcaagtgggttcatctcatacgtctcaacttcctccattagaaaattcatagtgggaactaatggaagggtcctatctttatgcataagtacaataggtggttacctaaacgactgcttcagggatcagcaaagatctcctcccatgcattcagttctacacctactgattcattcctttatgttaattgatgccccattccccaaatttttcctttaaaaatataatgatgtggttttcttctttaatttggctactcaattatctaagtgtctttggatggatttatttcaaaatagtctgagatatcaatacctgtctgccactggttgataaaatcattagacaggcaagcagtaaaatataaaaaatttaaacaacactatcaaccaacttgatctaattaacatttatagaaaactccccccaacgactgcagaataaacattcttttcaagtgcatatgaacatttaccaaactataccatattttgggccataagacaattctcaatacatttaaaagaattcaagtcttataaagtacatttcgtaatgacaatggaatttaattagaaatcattagtagaaatatctctagaaaatccataaatattggaaattaaatagtgtacctctaagtaatataatgggtcaaagggcaaatctaaagggaaagtagaaagtattttgcactgaatgaaattaatatataatgcattgaaatttgtgggatgcactaaagcagtgcttaaaagaaaatttatagcactaagtgccatgttagaaaaaaagaaacgtctcaaatgaatgactccagcttcatctttaaaaaaaactagaaaaagagcacattaaactcgaagcaaatagaagaaaggaaataataaaaatcaaagcagaaataaagaagcagaaaacaggccaggcgcggtggctcatgcctgtaatcccagcactttgggaggcctaggcgggtggatcacttgagttcggaagttcaagaccagcctggccaacatgagaagccccgtctctactacaaatacaaaaattagccggctgtggtggctactgtggtgggacctgtagtcacagctactcaagaggctgatgtatgagaatcacttgaacctgagaagtcaaggttgcagtgagctgacgttgcaccactgcactccagcctgggcaatagagtgagactccatcttaaagaagataaaagtagaaaacagaaaaaaacaatatagaaaaattaaggaaccctgaagctgtttctttgaatggataaatgaaattgagaaagttctagccaggtcgatcagaaaaaaagagaaatgacacaaatgatcaatagtgtgaatgagtagtatgaatgaaagaattatataaatacagaatctacatatattataaagataaactactttatgacaataaacttgacaacttagataaactggacaaattccttgaaagataaaaactaccaaaactcattcaagaaataaaagtaggtaacttgactagccaaaaatctgttaaataaatgtttagttaaaaaccatctccccaaaagattcattctccaggtgactttactggtaaatttaccagacatttaagaaataacatcaattctattcaagtgcttccggaaaattgaagagaggggactactctccaatgcagtctacaagacagcattaccctaataccaaaatcagacacacaagaaaagaaaactgcagaccactgtctctgatagacataagtgcaaaaaaatcctaagtaaagttttagcaaattgaacccgacaatgtataaatagaatcgtgatcaagttgtgtttaatcccaggaatacaagataagtttaacattcaaatattgtcatttaccattttgagaaactgaaatagtgttgcctcagtagacaccaaaaaacatttgacaaaatctaatgtccattcctgataaaaactctcagcaaactaggaataaaagatagctttttcatcctgaggaaggacatctacaaaaaaacgtacagataacattatatttaatggtgaaagacttaatgttttcaaaatcaggataagggtaaggatgtctgtttcaccacctctattcaacattgtaaaatgtaatactttttcttactatatacaaggcaatagaaaagaaatataaccatccgtattgagaaggaaaaagtaaaactatttttattcacagatggtatcactgtttaagtagaaaatacttagggttttcttcttacaatggaacctacaaaatgttactagaattaatacgtgggtttaacaagattgtgggatccaaaatcaatatacaaaaattaattgcatatgatagcaatgagcaatctgaaaatgaaatttaaaatgaatgacatcaatttaaataacatccaaaaaaattaaatacttagggataaatatggcaaaacatggaaaatatctatctgtacactgaaagctacaaaacagtgtttagagaaattaaagaagacttaactatatagagtccaaagactcaacagtgttaagatgtatactctccacaaattgatctatagattcactgcaattccaaggaaaattaccttcaatttttttttggataaattgacaactgattgtaagattaatatgtaaatataaagaaccacgaataggccggttgtggtggctcacacctgtaatcccaacactttgggaggccgagatgggcagatcacgaggtcaggagatcgagaccatcctggctaacacggtgaaaccacgtctcttctaaaaaatcgacaaaaaaaattagccgggcgtggtggcggccacctgtagtcccagctactcgggaggctgaggcaggagaatggcgtgaacacgggaagcagagcttgcagtgagctgagatcccgccactgcactccagcctgggtgacagagagagactctgtctcaaaaaaaaaaaaaaaaaagaaccacgaatatccaaaacatctttaataaagaataacaaatttagaagaatagcacaatccaattttgagattattataaagctatagtaatcaagactgtgatattggcataattataggcgcacaaatcaatgaaaccaaaacagacatatatacatatgaccagctgatttttcacaaaagcacaaaggcaattcagtggaaaaaggatagtttttcaacacatggtgttggaaaaactggtactagaacacatgcaaaacaaaataaaaacaaaaaacttcatactttcaccatatacacagattaacctaaaatggattatagacttaagtgtaaaacataaaactataaaagttctacaacataaaataggagaaaacctttgtgacctgggattgagaaagttttcttagatatgataccaaaatacaatcaataaaagaacaaattgacaaattgaacttcatcacaatgaaaaagttctggcctttgaaagagactggtaagagaataaaaagacaatccacagactgagagaaaatatttgcaaagcaaatatctcgtaaaggacttgtatccagaataaactcaatgataagaaaacaactatttgaaaaaatgggcaatagatttaaacagacacttcaccagagaagatacatggatggcaaataagcacaggaagtgatgctcaacagcattagtcattgggaagatacaaattaaagccacaagataacacttaaaacccaaatttacaaaaacttaaccaaaagaattgaagaattctctgtgaaaagtgttttgtgctgtttaagcacttcagcaaaacagaagaccaagcagatgaaatggcaacaacactacaaaagattaaaagggaacttgaatacgtagggaatatattgagaaacagaacacctacattacttgatgtaataaacaattatcggccaggcgcagtggctcacgcctgtaatcccaacactttgggaggctgaggtgggcagatcacgaggtcaggagatcgagaccatcctggttaacacggtgaaaccccgtctctactaaaaacacaaaaaattagccgggcgtggtgggcgcctgtagtcccagctactcgggaggctgaggcaggagaatggcatgaacccgggaggcggagcttgcagtgagccaagatagcgccactgcactccagcctgggcgacagagcgagactccgtctcaaaaataataataataaataaaataaaataaaataaataattatcagcaagtaacagaataggtgcacctagaactgtcttaaagaaaagacttcagaattaactgaatatcgaggagaaaaaaaataataatgaaggcaatagagagagaattcttgataggaagggctaacaaagatgattcaacaagaggataaacagcttccttaaagtagaaaaatgtaataaatgagtaacaagtatattatgcttcaattgttataaagttacttttgtttattaggtatccatttgtgtgttacatgcaagagaggtgtctggaaggaacggcacgaactagtcaactatttctgggtggttgaatttgaggtcttttgttgatttctttattataattttcagtgttgtttactttcaaaaaaaataggcaagcgtaatttttttaaataatggtaatttatattatttaatttctaaggggaattaaagtagtggaaaatttttaaataatttttgtttttcagtctgtggattgtctttttattgtcttaccagtctctttcaattttaaaataattattaacaatgactcaatatatttaatttttatatgatgtatttgaattcaaattaagcaaaatagtttatcttttttatttctggcagattcataatacgatattatggggttatttttattatttggggttaaaacttacactgatttcccctaaagccttataattatgttactttacattgtatttattgttagtccagttggcttttaatatactcctgtgtctgtaaagacatgtagtcagttcagttattccaataaaggacaacattggcagagataatcaaataggaccgtaatacagtccaatcacaagatagacaatggggaaacggagctgggccagaggactgaccccggttgttgaggtttgtggataattaagaccgaggggatatcaccaccctgaaaactataaaattaaaccaaagttagatgagtagatcaaagatcagtgattctgtcctcggctaagcaaaatagcacccaagcctataatatatatctgattagtgaaaattaactaaagacatgacagaagagacataactatatatggttatcttgtggcagttgtgtgtggagctggcttctccccttagttgcgctcttctccttggtgctttgtaaacattcaggatcttagttaaatagtttaggcccccagaaactaaacaaaaaggatggaacacctggctttgaagcttccaaatgcagattgatatagacatttaatatgacaattttaaatttaatgggaaagaataaatgagtaggaaagcaaattactcagtcacttgaatttctttcaagagtttatgttagacaaaggcagagtggaaatcctaggtcataaagatatgacgcttttggggttagtaagagatcacggcagtgctaaagctgattaattcactcaatccctcccatatgtctctatttatccatatgtatgtctacattgacatctacagatgctccccagcttacaatgggtttacatcccaatagacctatcataagtcaaacatatcgtaagttaaaaaatgcatttactatcccaataaaacgactgtaaagttaaaaaatcataagttgaactatcctaagtcagggactgtgtatatctacctctgtatctgtatataaacagatacagagtgttgattttgtggaaaagattttgtctcattggctgcttggcaccatatcgataaaacaatcgattaatggaatatttcactgttcagccggtggttgaagacacaggagagactcagagaaacacaaatacagtcagacagacagacagaattgcctatttatctttctcaaacagcccaaaatgtcttgataaacctagcagctccattcagtttgggattaaaacagctggagcaagaaaagtgttatgttgaagaaatcctgcaaatatcgtccagagtgaccatagaaagcaaaagtagacctcagaaaccacggccacaaggcccccaggaagaagcatcactggcacagataggatgcagaagcgctccagcgggatctcagtctcctgctaagattgccacacagcctggcttcttctggccatactcaggtccttgcccacacaaaagtgaaagtattgtgataccaactgtatttaatgaagaatcataaagatttgaataaaactggagatgaaatggatagtttgcttttcaatcttgaaagactacatcacttagaaaacatgattacctccaagttaatatttagaaccaagatatggcattgactttgagatgtgaaaaagaagagggggctttgctttacattttgagaaatctccttgtgagacatgggttgtcctcagatcacactagggaactgtgaaggaactgagagagagaaccaagtaacccacggcccctgctatagacttaccactcatttccacaggcaggtagcattttcaatattggcagcttggccactgttctcctgatgtggtctacttttctggagattgtatctattgtttcaagccacttcaggatcacattaagctaacatctagttttcatttccaacaaagccagtcttacaggtaaacctaatgcaaggtacaatgttaccatctgggagtagtcttctcatttctgaatgatgcctgagattctaccatcagagcactatcttttttatacagggcttggtctctagtaaaattcaaatattcctggaaagggtctctttttaaatgttgtgtttttaaaaagtgaatctaatgatgtgttccagcacttaaaattcttcagttgctcccaatcctccataaactctaaaatcttacgcaagatatatgaggctctttatgttcaggacccatgcctgcatctttacgcttattcaacagactttacttctgtctaatacctcactctccagtcattttgcactgtcagagttttcctcagcacaccatgccattccagtcctcttgtttcctcacttctggtctctgcctggaattctctcgttcttccttgcctatcctgcaaacccttgactcaatagttgcctcgtgctctcatctttgtaaacttttctctgattcatttaggaatatttatgaactcttttctctacttttgtcctttgtgtgttaccttcccaatttttgtccatgtcatataccgcatatgctattatactcattatttttcctatgatgattcactgttcatcaaaataaattccatgaaaacaaaataatgttgttcattgaacaattaatttcaaacatgaatataaatgaaatgtaagttataatcaaattgatctgcaaaaatatgtaccaaaattaagttaatcatcgagtaaacttgtttctctttggcagcaataaaggatatttgatttcatatgactagttgaaggtgaaaatgagattcttagtgagtaagataactctaggctttacttttatgttaagcacatttcaactcccatgtatataattagaaagaagaaaaatgtttaattactactaattgtgtggatgggggttcttagttgcaaacaacagaattcaatgcggctacctcaagcagccaagaaatctatttgagggttttgagtaactcacaaagttcattaggataagaaagccagattttgaggctgcacagttgtaatgcccaattacactaaggtatcccttgagaaacatgagcactgctgatgggcaaccatgactgttagcactgaacactattgttccagaaagaacaacattttttgccctcgtgcttgacagaaggtccatacgcctgcccagccacttcttcatgatggttacttctgaatcaagcctctcatgggtgttatagttggctgaagccaagtcaatcaggtacaccctagttgcaaggcattctagcaatatgaattcttcatagattttacctatgtaggaaatttaaaatgttagaatggtacacaaaaatgttggcagccataaattttgaatgttttatacactggtcaaatatttccaggagacttttgtttcaagaagctattcaaagtgatcttcagtgtctatttttgtatggaaggtatcaaattacttggtcatgactgtgaactgctggggaacgtgttgtttatctttctctcattggactaggaaaatacttatgaaggtctttcctcaggtctttcaagggtttcttaacaaggttgaacacattttcagcaaatctgacagatgagtacataaccagctggttcagaccatggaaagaatccaactcacctccctgggggtgtataccctacagctccaggttagaatttccatgtttgctttgacttacaggtggagtactgaagtgagactgccttgtaagaataggcaaaagatgctaatttgcaaagtcattttcagtcatgcatacaagccacagattgaagctttcattcaaaaacacttgaagttttcactgactcagtaaggtgagtgggaaattttctttgtcaatgagcatcaatatgagacaatatgttttctcagaccttgctcatctccttgcctaactgagaaaaaaattctagaggtctgtacgttgcccttaactgattaacaattttaacacatttgttaagtgttcctcttaaaatttcatgactatcccaagtgaccaaggtttccctatgtattcaaaacagaacagattttgcttctgggacacatcgttaatacctggaacaagtccttggtttgaaccaaactggcacccctcatgtttctcatctgttttatttatcctatctatgttaattgttttgtccatttagttttcactaaattattaatatcatctagtttcaatttctcctaattttaacttcttatataaccatagtacacttgtcaaaactaagttgttccattgccatgagttaaactctcagctttatttggatttcaccagttttgggatgccacgttgcagttaggcatcatgttttctctggcctgtgagtttcttagccatcctttgttttcacgatattgacttgtcatgtatatttgtagaatgtgcaccaatttgggtttgttcgatgtttttctcatgattcaatcagatctgtgagtttttggaaagaatatcacaggctgggcgcggtggctcattcctgtaatcccagcactttgggaggccaaggtgggcagatcacgaagtcaaaagattgagaccatcctggccaaaatggtgaaaccccgtctctactaaaaatacaaaaattacctgggcatggtggcgtgtgcctgtagtcccagctactcgggaggccgaggcaggagaattgcttgaacctgggaagcagaggtcacaggtcacaaaagactccatctcacaaaaaaaaaaaaaaaaaaaaaaaaaaggaaagaatatcacagagtgaagtggcttttaagatcaggaagtacatgatatcaacatgtcttatcactggtgaagttaaacttgatcaattgggtaaggtagtatttgccaggtttctgtattgaaaagttactatcttcccatttcccaatatctattctttgaaagcaagttactaaaactagcctactacttttagaagggggtgtatcagcatatattatttggcaatttctatagagatgatttgtctcttttcccctatttatttatttattagatcattatttatatcaatatgacattatgtatatttattttatgctttggattgtaatccaatacaatattatttcttttgttactcaaattgttccagctttggcaattaggagctctttccggttggctcctatgacatactccaccatttttttggtagcacttccttatttttggcactagatcatgctctaagctcatcttgtattttccttgacccagctctagaatcagctatttcaccaaggagccctggttccttttattggagactggtgtgagtacttagaaattcaaatatgagtgttgggtgcattaacatattttgaaaacacatgaacaaaattatgcaaaaaagtcttcttagatttgtattattatcagacaaacaccaaaagattaaccaagttcaaagcaattttgaatcctcagtttgcaatgaatagtatcctcttggttgtacttgggataataatcgctactttatgttttctatgatgaattgttttatttcttcaagtccaagggttaatgggaaggaagggaaaagaatgtgagacctctgggtctcagggggaagggaagtggagtaagcaaggcccacggaggaaaggtatactctgtggggagagcggggttgccacctgcagccttcatgcatatttcatttctttcgtaagggtggctcttatcactgctgtgggaatatttgcaggcaattctagttttgtccatgtcaacgaatcaattcaagttttggtttttagtctgcattaaatcatcagtcatttttcattaggatcagatggttaagacaaagaattactttactattaaagagcaaattattcttattttagctctgccatgggtgtcttctttgtcttgaacaagtctttcaatcatccagcattcccactgccataataacataatgcatttattggcctgtgacttgcatagtatctaagaggacagacaaagcaggcactgcaacttccaaggtgtgcgatcttgggcaagttcctttcctttacctataaaaagataatgatagtaataaataacacctagctcgtagaattgttgtagggattaaattacaggatgtttataaacacttaatataataactgtcatataataactacttaataaaagctgctgtcatagctgttattattcgctaaatgttttcgtttcctattttagggagctgtgttatataatagagtgtgttaagtatttgatcttctcccatttaattcctgctctttgctgcttcttaaggagaggttgggctgtgcttactccttcctgggctaatgatatagatgctcagggcttcctgggggactcttggtggcctctgtctgtgcttgctgacaacagccaaaagacaagtgtgttgactctccaataaatcaaacctcaacctgaattttatgcagagaatgtcagctgacccttcatggtaagtcaccttacatccttcaaaatatcacgtgactctttaaaaatgcagcccaccctcttataacagtgattgtccagggacccgtgatacgtgagggttttctagctgatcattttgagctgcggaagttctcatgcttgcgataggagaggctatctggtttttcttctgttgcatgaataataactctctatgataataaagaaaaagaagtatctgttgcttttttcccattctatcttgaaagtttatgggttatttttgtctatatatgtgttttgtttgtgaatatgcatgcatgtgtgtgtgtgtgagtgtgtatttcaacattttatggtccactgttaaaaccttccccccctttttttttgccttaaggacattggctaatattgcagcccccaagtagtatgggtttgaggatagagatctgcaatgttcccaggtaggtctgctgttaacacaggttaaatatgtcttgaatcctgagagcaaactaattcacagaatagctacacaatccacattccatctgactgtgttttatttaaaatgttgcattcaaagaaacaactactctctggccgaggcaatgtcaaataaatgatatgcttagacttgccacttgtggacagaccattttggtattgtgcaagcttgaccatatagagaggaaacaagcactttaaatgcatccttcacctctaggagggaactagtaaatgtcctttctgaaaataaagaagaaatactattctatctcccaggttttctctttaatttagacttacgtcagattccaggaggaaattgctggttgtcttctaggtttctcatgaaaagaaatgtttccaaagtccacttctgaactgtctttatgcagggaaaactaatctatgatgttagaggacagggcactggttaacctttgggagcattgactagaacagggcagcaggggacttctgtggtactgaaatgatttgcttctagatatgggtgctggctacacaggagtgtccattttatgaaaatgtatccagttgtgctctaatggtttgtgtacttcactataagtgtgtcatgctttatcagaaagttttcttttgtggtatatccagacaatgaattcagcactaagaaaaatgaatttttcgtttttctctatagtaaaacgatcagcagttgccagggattagtgaggaggaagggatgaatgagcagagcacaaaggacttttcgggcagtgaagagactctgtacgataccataatggtggatacatgtcattatacatttgtctagacccacagatgtagagcaccatctgtattagtcagtttgcattgctataatggaatatctgagactgggtaatttataaagaaaagaggaatattttggctcccggttctgcaggctgtacaggacacatgatgctggcatttgctcctgggggagcctcaggaagcttccaatcatggcagaaggtgagtggagccagcatatcacatggcaagcgcaggggcaggaaagctgttttaaataaccagatcttgcacgaactcatagaatgagaactcactcattaccatgaggacagcaccaagcaattcatgagggatccactcccatgattgaaacacctcccactaggcccacctccaacactggtggccacatttcatcgtgagatttggagggaacagaatatccaaaccatataaatggtgggtacttgtcattatacatttgtctgaacccacagaatgtacagcaccaagagcaaaccctaatgtaaactatggcatctggctgataagcatgtgtcaatgtagattcatatatgtaccattttggtggtatattgatagtggtggaggctgggcatgtgggggcagagagtatataggaaatctctatactgtctactcaagtttgttgttaaatttaaaccactctaaaatataaaatatatgcatatgtgtattttttaatcacacacacacttttaaattttttaattctttatattaaaaaataaaatagatatgcatctatatatattttttaatcacacacatacttttaaacaggaacctttcttttttactttaaatcgaattgcctacttctcatttgaagggtgaaggctgatgggaagggaagatagcagagggctcttatagccaatcctttcctctttggggagggctgacctattaaaggggaacagatgtcttctaaaataagaatgattttactatggaattatttactaataatcattattcagagcagcaaacaaaagattaagttaagctgatacatcaccgtatgaattattggttgtagaagcccccagacttctgcttggtttataattatataacatggtttaaaattacctgtaagagaaaatggacaggaaaattaccacatagccacataatattgagttcttatgagtagtaaatgcctagaaactgtaaggttgtttttatcagctgagcatatggggacaatgtagtggatgaatttcactgtgggtaaatcttgatggactatgaaccattggctcttcatttatatgtaaaactacccagtgtgttccagtcatcgtacaaggtactgaggtccctgccccccagatctcacagtccagcggggaagatcagcaggaaagcacatgctatgacagtgtgtcagggagctcaagggggccccaacaccccaagggggccctaagctgaaagagaggtctcaagaggcctcttgggggtgatggcacctaagataggccttggcacaagagatggatctgagggtaactgtagattattccttcaaaacagcagatcaaggctgaggtgagaggattgcttgagcgcaggagtttaaggctgcagtgagctgtgatccggctgccggagcaacagagctagaccctgtctcaaaaacaaaaaatgaaaaacaaaacaaacaaacaaacaaaaaaatcccacagatcagacagcttcctatgcatacattttggagcacataaagaagatggttgaggagaaagtagaaatgtcctcaaaaccattaggtatttctatgtgtcctgtgtatagttctgcacagttcaagaaaaatatagcaaacttggagaacagagaagaataattcaagcaataacatatcaacttccatttgcacacactgcctattacaacgtaaaagccagtcttacagactgccatctgttgatagctgacccctcctcaccattcctccctccaccaccctctactccactccagtcaccagcaacagctccttcaataactgatggataaagacctgctaactgcaactttgtttaagcaacattctagaagaagacacccacacatcagggtcccagtagcaagactaaagttgatctatgtggcaaataaaggctgaaatctgaattttcaggattgagaatgtatgtctctatgaatagagcttatgtctgatagtgttgtggtaaagaaaaagtgggactcttcttaatctgaaacaatgaaagttgaaaggagggtatctggtgaaattgtataaaatcatgcgaaacagagttggcctgtctttccatgttgcacaacagcagggggcaccatgcatcattgacattgtgatcagcaccccctggagttctgcagtgtggcagccctggagcaaatctcacaatcccagaactatgggacaacggaggaagctgggaagatatacatttaagataaataaaataatttctacctaatatgactgatgagaacattttagactttaatttctgaaaaaaaatatgcaggctaaatatataaatggcaacaaaatgaataatgatagtattggattatagcccaaagaataaaatcagtatccacaagtccacactgttgacaataaatgattgaacagataaataactagggaagaagagactaatcttttttgcagaagaattccaaatactgtaggttgatactttctcctccagtgagggttacataattcctctccccctggagaagtatgggatggatttgcttccaaaaaatagagcatgagaaacaaaaagatagcaactttatagtggagaaacttggcaggcacaatctttaataaatgatcaagatttatatcaccagcaataagtcatgttaatatcatgtcccctcttatatgatgtaatgagaaggacatctcactctacgatactctttctaagactcacaatcctagtctacaaatgagtgaaaatgaatagaaaattaactgagcaattaactgttgagaaaaatatcagacaaacccaaattgagggtcattctgcaaaatacctgaccagtactcttcaaaactgccaaggtcatgaaaaacaaagcaagtctgaggcagtcacagaccagaggagactaagatgacatggcaactaaatgcaatgtggtatccccaaaagggatcctagaacagaaaaaggacattgctacaaaaattggggaaatccaaataaagtctggcatttggttaataattttttagtaatgttaatttcatggttttaaaaaatgtactatggtggctgggcacggtggctcactcctgtaatcccaacactttgggaggccgaggcgggcggatcacctggggtcaggagttcgagaccagcctggccaacatggtgaaaccccatctttacaaaaaatacaaaaattagccgggtgttgaagcgggcagctgtaatcccagttacttgggaggctgaggcaagagaattgcttgaacccaggaggtggagattgcagtgagccaagattgcaccattgcactccagcctaggcgaccagagcaaaactctgtctcaaaacaaaacaaacaaaaaaaattactatggtaacataagatgttaaaattaagggcatatgagtgatggttatatgggaacactttactatcttacaacttttctgttaatctaaaattatgccaaaataaaaagtgtattatatttagttaggtcagtaaatgatagatccataatgtaacatcatgagaaggcagagatatttgatgcaaatcttttacctttgggttattcttctagggttaaaactcagcccagtctgccacttatcaattgtatgatcttgcacaatttatactctttctctgatttcagtttccatgtctttaaaaacttggataccactatctgctttacaaaattattaagtgaattaaatgagataaggtatttaaaatgcttagcacagtgtttgacacacagtagacacttatcaggcaatgctttccttcttttctcataatacctatcttagattatcaccatcagacagggtgttaggtttttgtatcatgaaattaaccccaaaaagaagatttttgtagaagaatttttattgacataatagttgtacacactttaagggtacaagtgatattttgatacctgtaaacaatgtgtaataatcaaatcagaaggatattttaactatgagaaggaaagttggccaggtgtggtggctcacgcctgtaatcccagcactttggggggccaaggagggcggatcacctgagttcaggagttcaagaccagcctgaccaacatggcgaaaccctgtctgtactaaaaaataaaaaaattacctggagtggtggtgggcgcctgtaatcccagctactcaggaggctgacgcagggggaatcacttgaacctgagaggcggaggttgcagtgagctgagatcgtaccactgcactgtagcctgggtggcagagggagactccgtctcaaaaaaaaaaaaaaaaaagaaggaaagtcaacacaaagaagtttagtcctgtaagaagctgctttagtgtgatagaatttcctttaaaaatgagtggaaatgaatagaaaaccaactgagcaattaactgtggagagcatgtaggtgaaaatagaattagttaaagaaggctttgtggagtaagtgagattgggatagaaaaatgaggaatgtgttggtgtaggtttgggggagaatcacattggaggacggagaggtgagttccttctggcgcaagagttcaggtgtttgggccaatgacccatgggcagaattgcataaagttcaatgtagccttagtttcctttttttctttcagaagggctctccttattcattcttgtttggcccttctctctccccttagctccccgattcctcacaccacttcccagctgttaaggaccacaccttgtgccataatatctaggcctgctctcaaaagccactgtgcactcaaagcttcccagatctatggccatttatcacaagctttcagccaggtgccccattcccacaggtcttttctagactttagaaatgacctttcattgcaaatgtctgaaagtggtttatgaggctttttttttttttttttgagaagtagtttctagttttgctcttgccccccagactggagtgcaatggcacgatctgggctcactgcctcccggattcaagcaattctcctgcctcagcctcccgagtagatggattacaggcacgtgccaccatgcctggctaatttttgtattgttagtagagacggggtttcactatgttagccaggctggtctcgaactcctgacctcaagtgatccgcccacctcagcctcccaacgtgctaggattacaagcatgagccactacacccggcagaagctttcctattgcgagaactttgatatgttaagctcttttatgtcaatgcatgattgaagtagaaattttagtcactgtggtacagtcaaaagaaaaaaaaattggggtcagggtcaaaatttgtatatatatagcttggagcttggctgaagtctgggtcagagcgtgagaaagaaataaatatggtagatgaggcaggagaagccaggaagtgaagaagatgggaagggtagaatgttgctggaaacaaacaaacaaaagaactagtgagtgtagttcacctcaactaggctgagctttctcaacctcagcgctattgacattttgggctggataatgcttcgttgcggaaagctgtcccgtgcattgtagggggtttctcggttatctctgacctccaccctctagacgctagtagcaccccctggttgtgacgactaaaaatgtgtccagatattaccaaatgtccctagggggcacaactacgcttgatttagaaccactgggttagagtgtcaggctgttgtcattgcagatgcttgtctgtttgttctataggtaacctggatttaatttctgacagaatatcctgctcagggcaagtgtgtctctaagaccatacagtcgtggttggttgatcagatttctgtttttccaggtaggtttcatagacaaagagcagtgcagtcttttatctggagtctgtaacttttctgcaataatgagaagtagtcacagtgcctccccttattttttttcagtaggaggaataactttgtgggtcaaggtgagctttatgtggaacaggagacacgttctggcaaagcagattttcatgtacagtgtggggagtttcctgggggctgttctataggtcttcaaggagggctttgaaggaacacattccctttgcaagtaataagcaggtctactattgcatgattgatacatgttggggaaagcatcaccctttcttagtggggtcatgatgctctcatgaatgacaaactcccttctgccaggggaacaggacagaatgtaggaaggggaggcatggccacagtgtcctctgtgggctttcccttgtagggcgtcgtctcttgtcttcctccactcccatcaatattcaggaaacttgtatttgaagtggagtaggaaaaagtagtatgacattttgagattgtcactttattctaacacttagcaggtgacagctgtggtgacacttcttccccacccaagcccctattaacccctgtccaccttttattcttttcctcttcctcctccatcccttttctttaatatattattaggtcatttatttaagaatagttattgagtgtccattgtgtccagagcctgtcagacaaaggaccagctagtatctagagactttgtgctgccctcaggccaccagatgggacaggctacctgggcaggtggcagcaataggaataggaagtgtctgggagaggcgagcaggatgtgcagaagaggctggcgactggacatggcagaagttccagttttccaagtctgaactgggggtcaggaatctagtcttctgctgggaaaagaaccagagacgaacactggactaaatggggccagtcttcagtaggtgaaaccccagctccttgctgaaggtggggacactctgacaagacagaaacaccccagctgtcctcgccacagctcaccgtccatcaaggtgattggtacggagctattttagctcctgacattccagtggtccaggaagaggactggcctcaagccttcaggagttcaacattcaagtatatcctcatcctaaaggtggaaaaggataggggtttcgcacaaaatcggaaacaggagaatgctgatggcctgtgatcctcagaactctgtaattcacttgcgtcactacaaaaaagggcttggattatccagagagtgtgtgtgtgtgcatgcgcgcatgtgtgtgttcatgcgtctgtgtgtgtgtgtgtgtggaggactgggttgatttctcttctgatatcacataaagtctcacaacataccctttctctgtaacaagttttattaacctggggtccatggctggaagtctgtgaatctctgaaattataagcactagtgaatttttttctaagcaaagaggtcctcagcattcttcagatccccaagcaacctatgactgatgcagcttgagaacatccccaccaggaaaaacgggcccctgggagccagatgtacgatagaaagagcctctctgttcatgctaccccctgcttttcattagttgcctctctttattaaagctcccctcctcccttacagtgggtattccctcagaaatctatttttgaacacagaggaggataaatcagtaatatagggtctgatctgatgaaacaactttgaacactagcataccataccaatgattttcatttacattatcttaattctcacagccaggtgaagagggaggtgtcagtcctctcttcttacttacaaaacaacaacaacaacaaaaacagaaaaaacaacccaaaacccctgaggctcagagaggtaaagtgacttgcccaaagacacacagcaagtaaatattgcagctggtatacgaaacctatttccctgatactggaaacagcaagcactctttccactatcctgtaattctgtcaggctgcagcatgaagacaaagatcacactgatcagagatttacccaggatgctataaataccattgctaattactcataaccacaaaagtcaccacgtcttgccttgttgttcctttaaccaatacacaaagagccattctcagcaatgtcaaaaggtagaggagactggatttcttgatctttgtttctctcgaggcctttaaacaaatgacaacgatggagaacagttattaaaaataaaaatccagtgtacaaaaatctatcttgattatcttggagtctgactgtcttgcctctctctggttgagcagggatctgaatcctatatgaagggtgggtctacccggctgagaattgagagcatgatctgatgattccaggtgaaaaaacactgttgtttccatcacctggagacttcagccatcatgttttgcttaagggaaaatttctttggtctgacttatccgaatagtctcttggctcttagctttgttttgcttggtgtcactctggtcataaaggagctgatatttctgcagcaaaagcatttctgaattttatgaaaatggtgctatagaaacagtttcatcagggcaaaggcttctgttcaataggctcctccaacacacatgcacacacacacacgatcagggatttttttttttctgtgtgcagagagtgcctttatctctagccttcttcgctttcttcaccttacattggaatgctgcataatataaacatagatcatgtttatgatcagctaattttgctcctgttctgtgatctccccttctctctttttctctctcccacccatcatttctttttgctgtgcagcgcttctaaaagccccaacaaatatctgaagagctgtgatacctccagcaagtcctcgttctgttacgagctcgcaaaacacacaatgccggcgctgctcagtaatctccttgtcaaggctgcctctctaccttcccatcctcattccaggagcctattaaattaatgagatagaagtcagtgctacagcggtcgacatgttattggtgtacagcgccgatgctgttacagtgtgcctgttttctctcctgggacatttaatttccgcttctcaaatgagctgcgaagctgtgaggcctggcagtgttcgttctcggcactctgtgatgcagataatgagggtactgataggtgcctaggagacttcggtggctccaagctcagccatggtctgataatgctttatgccagcagtgtcagagcggagccactatcatccctcaaggaatggttcatctttatgtgtaatacagcagctgtcacctaaatggctaatggggaagcaaagtagaaccttagtgctagtaatctttgtcacttaataattttaaaggtatcagacttcagtggctcctgcaagttctaataaaagcgcacttgccgattttaggttgtttgtggcggattaaatttaaattgagaaatccatggtgttgttctgtgcaaatctaatttagtataacttgaataaccaagtaattaaaatgtattataggtataagatgctgggatggtggagtgcctacatttaagaggaagatttattgggctcgcagcatccacagtgaaccttctacaaccacattagctaacatctgttagaaaatgtcgagatctggggcagaagacatgcatgcagaatatatgcttttgtgcattggaacgacaaattggaaatacggggcagcacttggaagttaaattaattagtaatgagacctgcatccatgggcacacacatgcatgcgtgaggggtatatgggtatacaaaggggcatgtgtgtgtgcacataggtacatgcaaacacacattcattctaattaacacccagcccctgcagaatgggaattgaagtttgattggatttaaggagcagggcaataataataggacagttaatacaaacgatgtctgtgttgacactccaccattagtgtttcctggcagattattttgtttgctttgcctaagtgcacaagattataggaggtgatttagtaggctagggcactggattctgaagggaagccaagcaaatttcaatcacacctacaatcagactcttaatctttggggagttactgcacctgtgctggcaaaggttaagagacaacagattctagaaggcacagataaagtaattgtccaagggaagaggtatagatggaagggactcatgattctcttagaggataaatcagaggacatttggaaatctgaaagaaatatgcttgtggataagtgcaagatatactgcccagacaaacatgaaacatgttccaagaaaatattggtcaggagacagtcaagagtgctggctaccaggtgggtacatgggaaatatgtttaaatagcaatgcgtattacagttttctttcttcatcattgaatagcttgcgactattttcaaatgtaagtcctgttaagagaaaaatactattatcatggaggaactgaggttttggatgctatttgacattttcacctcgtctctgccttctgaattgttttactatccttttcctaaatctttggtcaaatatgagcatagttaatgagaaattttaatgatgtaatcaacttccctcaaaagactaatcctaccctggtgaacttacttactagggaattcacttattggaggctattatgtattgtgggtccacaggtataaatgtttagttcaggacccttaagcctctatcttattcacagcacatctcagaagatgcaacgatagctgagtgttttgaataaatatgtagattttaaataaggttttaaaaagcaccctctggtttgtgatgtctgagccaaatacaggtattgacataagtgttggaaacatttactaacacctgcagtctgtctcctcagtcatgtgcctctcaagtaagagaagaaacgcaaatacgacagagtcatcaaaaaaaattagactggtaatgcaaaaattttaaaaggttgcttttgcctaatataataataacaagatattcaacatagattaaaattgggcactttttttggtattcactagaaaggtatgaatcaccaagattcatacttttgggatccttatggatgtaattgataagctctatgcaaaatccacttaaatttagcattcattaaagtccacgtcatataaaatatcgtagattaggtcagatcttcagttcattgccgtttcaataggaagcactgttatttgtgctttgaaaatcacctaaaagatggcttttctgaggtgggagtttgaaagtcaatattgtcagcatgaaaataaaaaaaaaaaaaggaagctaacatatcaagtatctggctccttcttctcttatttattcaaaccaaaggttttgccacacatagagcgcagaggtaatgactgtgcatctgttgccgtaatacagtgaactgggaagaactaactctgtgcaattcaataaagtatatttagcatattttcattgcaccaaatatcagctgatccacctcttattagtataaatggcatagattagtgtcaggcattttcaacagtgaagaaattacaggagtctgcaaggctcattaggttccggctgcatgttaacgaggggccaggccttattaataagaagaggaaaagataaaactaagctgtgaggaaaaaagggaacaaaacactcctttagaaattctctgacatttagaagtgagaagactgcaccaggaggttcttttcttagctcatctcctaggacttcgtgaagatatgcttttctatattcttattattttttgcaacattaaaaaaattattttgtttcagttcatgacaattacatacagaaaccatgctttttaaatgggtaatatggttgccaacttttgcttttgaatagctgatctgaaggagagtctagattttgtatttacatcttcttttctctcacctcaatcaattaaggaaggtggtgagacctgcctgcttcagcctagagaaataataagatttgtgtcttgtccctgcttccatacctctctgtgctggataatccaggtggcaatattcccaaagcaatccgtccttgggaagacaggtcaagaagagactttctatagtgttatgctcaaatgaggccaatgaggactttctctgttaacccaaaggtcagtgtgatgaattctgattgaaaaacaaatcaaccaacaaactctgtttttagcattttgcttaaatgctgagaaattaatcaataaggccttacaccagagtacaggggaaaagtaagagctacacagggcacagtataaacaaaggtcctggctagaagctacattgatttggacccatgtcagaaggcaaagaactgaaagcaaaggaaaactctccaggttcagtacatgctatgaagtgcttttgaaaaaaaaaggaaaaagaaaaatcaggaattcatccaaaattctttaaaaattttgcatatgggtgtctgtgcagacgtatgtgtgtgtgtgcatatgtacacacacaatggagcaattttattgcaaaactcttatattttattttattatattttatattgagacagagtcttgctgtgttgcccatcctggagtgcagtggtgcagtcttgctcactgcaacctccacctcctggattcaagcgattctcccacctcagcctcctgagtagctgggattagaggcatgcacgaccatgcctggctaatttttgtatttttagtagagacggggtttcaccatgttggccaggctggtctcgaactcctgacctcaagtgatccacctgcctcggcctcccaaagtgcggggattacaggcctgagccaccatgcctggcctgcaaagcttttaaaagcaacaacagaatgtgcgtgtaaatggttggtttttaatgcaaaaattacaactgctcagattttgcacttctacagaatttctcagccaagaatatttcaatgtttctgttaggctatgttgttagaaaatgataagttttccattaaaagaaagataaatatgctaaagtaatagtctattgttgaacagtcaacagtaattaatttagagtttcaggttgttttgagtcatcctctattatgtttatattataatccccaaagcttagaaattgcatttcctttatacccattctgattcacctattgatttctcccactgtgtttaaaatgaaaatgaaatgaacttgactctggagatttgttttgaaccagcattatcaccagcatccttacggttcccaaacatggccttttttggcagatgacaattgcaaggtgaggtgagatgtccagttttcagcatcaaacccatttagtgattacaccatgtctgtgtgccgaatgccaacagggagatgcttgaattctgggtcatagtgtgaggggtatttagggctctctcaatactgctttgtctcaaactatttggatgattgagtcaatggtggttgttattttaatccgcattgaaaataataaagctttcttgcctttctccacctcacctagcctgtcttcacacagcaacagttggttgcaaattattgcaggcatacgataatatgtatagaaatgttttctcttgtaaaatattgtgtatatacacacttatgcccacacaaatttgaatatttgcttatataagcattgtggtttttaggcatcggataaggcattttccaagatagctaaatcaaatttctgggaggataatttttaaaataagatgtatctattttaaccatatcagtttcatcaaatcaacttctgtgaaataatgccacaaaagtctctcacagagtcagtgtgaagaaagcaattgtttcttttttctttttaatctttaatatggagacatagaaatattttctggccatcatctttcaaagcagctcttcccagtggaattggaatctggttcatggaaactttgcaaagctcaaacctccaaaatccccatcgtgaaagatcgtgtgtattacttgattttctaaagtgacaagacgtacattaaaaaatatttctcttattgttacatttcaggcacgtttactgttagctgcttggcttcattatgtatcatagtctgaatctacaaatcaagtataattagacttagcgaactgattggatttctaattaagctacattggaaacaatgcacaatcagtaaatattctgactaggtacattttaaagagcaactcttgggctttttgctgatgactagacaccagtgtcattaaatttgttggtggcaagcaaattttaaagctaaaatagaggcaattagtaaagatcttgaaatatttaatcacgtttgtccaattagtgtgcaattaggcagtggtgtggcgtgggacaggcattctgcttcactgcttggtgcagaaggatccctttgaaattttgctgtttagtttattgatatataaaaaggaagttatggttgtaatttccaatttaaaaaaaatactgtgcagatggtctgactatatatttaacaatgttaaacaaatccaaacaagggaagcatgttacctgaaattacacagctgtgatctgtgaataagctctggatcatggtagattacagctgtgcttatctcgatcattgaaaccgccaggcattttatactggaggaatcgggaacctgataagcttgcccaacaggtcttaaaatgattggcagctccttacttgtccaagtgtgtgcttcctggtggctagcttggctcctctgagttccaggggttttaattttatgcagagggagacatgggaagagatcttgtaaaaagttgatttggggagatggataaactgaacagccttggtacctgatgttgtcattgcaaaccgactgctcatatctgctgagttacagccttgagatgtgactgtgtgagggggaggtttggcatgcccagtgcaaaaaggaggaagaatgtctcttatttttaacacttagatggttttgcccagctgcagaagagttccactctctttacttatgctggaatgcaaagagtactttcctgaaattcttttttagatgatctctggaaaggcaataccatttccattttaaaaagatagggcttgcagggtgacggggatctcaggcagtggtcagacccagggtcgaatgacatcaaaggtgcctgggaaagggtcactcccggagtgactggatgaggcagtgagatgatgatgagagaattttagggaaatgaaccagggagaacctgacagggaaccaggtgcgtacccaggtaatctgtgagagaaatacttccatactcttctgggatattgacttcatgctcagccagactgaaccatctcaatatcatttgaagtggaacagaaacaatgtccctaagtacacttgattttctagaccctggtaacctaataggttgatgtgtattgcatctcaggagtccacggaaggatttctggacagagacccagttctcctaggcatactggcattacacattaccaggtgtaagtgcatttggtttggaaaagttttggaaactgggtgagaggaaattccctgggtatctacagatgtagaagcaaaggaaaagtgaaatgtaaaatgtccttgaaaaaatgacaggtgaattaatgtggaggttgggggaaaaggtataaaataatacaaggccttaaaatagatttactggggatttagggaagctttatcatacttattttcctatctcctgtctctccccagttttgaaggtttttttgttctgcctctctagaagcagcttactatcaccattaagtcaaaaccagatattttcaggcctttgagtaaaattgaattcccttttgagatcagattaaattctatatttagaatgttcacaaatttacaattctaaatatagcaaatgctaggtttaaaaacttagaatgttagtaaattagctgtggattatacctcttcctagttgttgctgaggcaggtataagattctaaactgaagctgtctgctgctggcgatggtctcagtggagttttgtgggattctagccaacaatgccctctgccatctaaactgttgggagaggagattctgttgattgcttctaacatgtggcagaatgcatacttagaggagttcaatagccaaaaataatttttgtgtttggcataaacattcttcgtcttgtggtctttccatggtgttcctcatgccctcttcgcagggtctccatgtctgtgtgccttttccaggctcccctcccacaacctgctctctggaaaccttctggataggattggccaagattagcaagtaaaaatacaggctacctagatagcccaatgttgaagtttcaggttgttcattaaggtacttgttctcaatcttggctgcatattagaaccccttggggagctttgaaactatcaatggccaggccaaaacccagactaattaagtcaaaatctccagggatgagacccaggcgtgtgtattgtttaaaactccctggtgattccaatgtgcagccaagtttataaaccactgaactaaggaagagttctcaacaacggtacacattagaaccacttagggaattaaaacacatactcatgtctggaccccaattccagacattctgacttcattaatcccagtgagtgactggcatccataatttttaaacctccccatgtgataggaaaccatttagttaggagataggcagaagggtcttttgaaaatcaatgagtcatcccagcactttataaatttgcaccagggtccccatctgcccacacataaagctatctgtgatgcctgcttactgtaagaaaagattccatcttcccctaagggatcacatgtatctgcttcccagtgaaaatcagggtcttctatttcaggggcacttaggatgcccatgacagttgcctcaaaaaaaaaaaaaacaaaaaaaaaaacaacagtcagatgtgactgtgcagaattgaaggcaatctttttaaggaataaaataaactgtaccctgctgggccatatgggtagatcagggagttgccatggaataaatgattatcaggagatcctgaagactgaagggagaaattaggtcagacatgaaaaaatgatcaaggggaaaagaatttcacaaaaagatagagtgggatgaatatgaaaatattaagaaggatcgagtgaatcctaaattaagcttattttggttgaagactatgttttggccataaaccaaagcaaaccctaagaatttgaggtgtttgggtgacaggcagcaacaggaaggccctcgtaactctgacagaagttggccaaacatcatactccaaatgctgttgagtaaactgacatgagacagttgatagacatcagctccgtatcgtttgtgacccagcatgccctgacagtaacacgtgtttgtccatctgtcatagactctgtggtttagaaaatgggagtcccttcaaggcacttgatgtgacaagagagtcacagcaaaaaacaattttggctgaggtcagatgctggggaggacatagaacaggtaccagagccctatagaaagaaaagctgagcagattcagagctagacagaggtcagggactgattgagagtaggagatgccaagtcccaatgtgtgtgtgtgtctgggtgcctatgcgtgtgtgtgcccatgggtgcctgtgtatgtgtgggcgtgtatgttgaggatagttctcaaagagggttagcaggagtctaggagctggtaaaacttggaaaacatacactgaaaaacttggaaacatacactgaaaatcaggggaaattgcaggcagttttctgcctccttccaggcccctgtgggcctgccccaagaacgtggccctgccgcctgaaggacagacttgggtctgaggtgcacctggccccattgtggcatgtgcctagacagagtgtctctgggcagaacctgccttgcccagagttactgatggaggagcagtcccaggcccctcttttttatcctgtgaccccacactgtccgtctcacagctgatggggatagaagtgggtaccctacagaagggcagaaaaccctcaggctgaacagcacctataaccctgttcagaaaaagactagctgggccaatcagattttctcttggaaatatgaacaaaagcatcctaagacatatattcagatgatgggaagggggctgcttagggcagagttggggcaggaggccttggtgggctgtatgtagggggattagaaactttgatgaagcaaagacagccaataagagaaagaggagaacacaagagatatgctgataaatgaggaggtgtggaaagaaagaaataatgccacctttgagaaaactagctgatccctagagctgccagactcctaaagcgcattgcagttcgtgggtcaactccagtctgtgaggggatcacttcctttctggaagagagatgcttaacgtagctctgtggtttggtcagcaggtttccttagtgtgatctccccatgagactgaacagggtacccgcaggaccacggttttcgctggtgtaaacttttcggtggggagatatttgttatctcagactgagtctctcattcagccatggcagttatctgccaatctgcccagctggtgcaggactcggctacttcaataagaaaaaggagagaagacagttttctccttcgtccttccccactcctgcccccctcctcctggcaccactgccaccactcctcctccctatattgtacaaaaccatgtggatttgctgaacaggtctgcaaaattaattatactgtgagtgcttggtaaccaatgaattgtaaattgtacattattaaaacagcatcagagctctgactgatctattattctttggggaataaacgaagataagagctttatgcattttagaggtctttctcgccaccgtacagcaggcatggagaggaaatatggagtagttattttgttttgtttttctgcaagttggattaaatagaaggagtgtcatttttttctgttattaaattgttatttgtgctctcacatgtcggtttgcagcatctaatagtgtagtggtcactcaataaatgctattctgtagtgattgtgataatatgtatccatatatgctcatccacaaacgcagcaccatgtcaacctaatgtgaacaggagatatatgatatgacatggcatcgtaataaaagaaattgtgttgatgtagtgcttctctgcaaaacctcaggaagaattcagagtaaacagtaggaaacataaagaacatcagctgagtgtgcaccaggggccttgtggcttcaattgaaaaggaagaatctggaagaaatggcttttcttgtctcttccttctagacacaacaagattactcctgggagttgcttatgaacctctctttttactgaactatctcctccgtgcagaatttctcagcacctttctacctgccatgatgattccttccaggcgcatcacacggttctccatggaaactttcactttctatgattgaccaagcctgtcgtccctgggactgtaactgccagtcagccacgcagcattgccccaacaagcaggcgttctagctaagagaaccgaaacaggtaccaggcaaaccacatgccatcccatccccaaaataaataaacagtgaaaaacccaccattgcagttggaaatcggatgcctcaggactgagctattcctcaatgctgtgcaggaccagctacataatctgaggcttatgcaaaacgaaaaggcaggcccctcgttaaataaaattagtaagaatttcaagacagtgatagcagaacattaaactaagtgtgggcccttcaatgctcagggcattgttcaattgcacaggttgtcacccaggaagctggccattgtgtacagagggacatttgcccactggtttgggaaggcgtctgtatttttttggtgcattttaatcttctagtggcctgattggaccatccgacaatttcagcatttgttttgctgggagaaggacagtgccattcattttttttcccctatttggagctgcagtgagatcactcctccctctcgatgaccaggtaatggccatttgcaatatgagactactatggcaaagagacaggtcaaaggggaatgatgttttatgatcaagctgaaaaatctatagggagtcgggggagctcaaagatgcctgtgagagacagatagacaaagagattgccatagaaaaatagaaatcaactttctgataagacattcttagactcagtcatactgagaggtgacagcgtgctggcagtcctcacagccctcgctcgctctcgggaccttctctgcctgggctcccactttggcagcacttgaggagcccttaagcccaccgctgcactgtgggagcccctttctgggctggtcaaggccggagccggctccctcagctggcaaggaggtgtggagagagaggcgcgagcgggaaccagggctgcgcgcggggcttgcaggccagctggagttccgcgtgggcgtgggcttggcggccccgcactcggagcaaccggccggccctgccggccccgggcaatgaggggcttagcacccgggccagcggctgaggagggtgtactgggtcccccagcagtgccagcccaccggtgctgcgctcgacttctcgccgggtcttagctgccttcccgcggggcagggctcgggacctgcagcccgccatgcctgagcctcccacccgctccgtgggctcctgtgcggcccgagccttcccgatgagcgccgccccctgctgcacggcacccagtcccatccaccacccaagggctgaggagtgccggcgtgagagtggcaggtagctccgcctgcagccccggtgcgggatccactgggtgaagccagctgggctcctgagtctggtggggacgtggagaacctttacctctagctcagggatcgtaaatacaacaatcagcactctgtgtctagctcaaggtttgtaaacacaccaatcagcaccctgtgtctagctcagggtttgtgaatgcaccaatccacactctgtatctactctgtactactctggtggggccttggagaacctttatgtctagctcagggattgtaaatacaccaatcggcactctgtatctagctcaaggtttgtaaacacaccaatcagcaccctgtgtctagctcagggtttgtgaatgcaccaatccacactctgcatctactctgtactactctggtggggccttggagaacctttgtgtggacactgtatctagctaatctggtggggacgtggagaacctttgtgtctagctcagggattgtacactcaccagtcagcgccctcaaaacataccactcggctctaccagtaagcaagatgtgggtggggccagataagagaataaaagcaggctgcgcgagtcagcagtggaaaccctctggggtcctcttccacgctgtgtaaactttgttcttttgctctttgcaataaatcttgctactgctcactcttcgggtccacactgcttttatgagctataacactcaccgtgaaggtctgcagcttcactcctgaagccagcgagaccacaaggctactgggaggaaccaacaactccagatgcgccgccttaagagctgtaacaccgcgaaggtctgcagcttcactcctgagccaacgagaccacgaacccaccaaaaggaagaaactgaacacatccgaatatcagaaggaacgaactccagacgcgccactttaacagctgtaacaccgtgagggtccgcggcttcattctttaagtcagtgagaccaagaacccaccaattccagacacaatattatgatttttctcagcactatattgttgctatcttcttgtcctccaaaaaaccccgcatgattttgaggaaaagttggcaatagtttctttctttttatttttaggggtcatgttcacctgttctttctcgtgtttggtaggcactaggaaataggagcgttgattatccagggacgtcagggtagcacagggagacgttatgagggaggggttgagggaggggccatggtaccaatggttactggagaatgctcccattgcagcagagcagttgttggggaggtctgcacaaaacctgggttaatgagccgtgcctagcccagcaggtttaacttcctagaagggctgcctatgtccctgtgacctgtcactgctgtgagaacctcaacctctactgtctgggaaggatggctatcttcagctggacaggcttgcaaatcgtattctggcatacttcttcatttcagtatctttatcaacagaactacatgcagacactttaggggaattaatagatcagcccagagggggcaggcggataagaaatgaaattacaatagcgaagttatggaaacaacctaagcatctgtcaatggatgaataggtaaagaaaatgtagtgtatatatacatactggaatattattcgaccttaaaaaagaaggaaatcctcctatttgtgacaacatggatgaacctggaggatgttaagtgaaataaaccagaaacagaaaactgtataacctcacttatatatggaatgtaaaaaggtaaaactcatcaaagcaggtttagaagggtagttatggggagaggctgggggagtaaggagatgttggtcaacgggtacaaattttcagttacgcaagatgaataagttctggaaatccagtgtacaacatggtggcaatagttaatgatattgtgcagtatacttgaaatttgataagagggtagagcgtttaagtgttgtcagcacacacatacacacacaaatggtaatgatatcaggtgttggataagttaattagcttgattgcgatgatcattttacaatgtatacatatgtgaaaacatcaagttgtataccttaaatatatggaatttttatttgtcaattatacctcaataagctgggaaaaaagaaaagaacaagtaatagcatgctttatacttcttttgctgcttcataaaattggttttgcttttgctttggaagaacaccagcagagaaagtagcactcaaaaggggagttaaagtgctgttccagtaggctctggattagccagaaggttgaagcagcccctagacagggaaaagaggctgtcttcaggcaataggccctatttaggagtgcagtgtgccctaaaattcaaaagagggcagcagataacttgcactgcctgtaggaccaggaaagcgtgtaacttgaggaatgtcagcaggaaaatttactggtttttcaaaactcacgtcatgcaagggttaggtgaaccagaaattgtgtttcataaattgtgtgtttaagtgtaaaagcaaatatttgatgaatgggatctaaggagctttggtgatgtggaggggcaagtgcaggcagattgtccaccatggcagcctcgtgctctgttatttagtgatataaaaccttgcggtggcaaggtcagcaaagttaaggccagagtgcatgagaaatagctgtggagtgtgaggtgaagaggctgcgtgtgtgcttgtacagtctcctcgttgctttcaccgagtctctccaatgagcgcgaccctcctcacaaagtgtgcacagtgcttctctcctgggtaaatttacaggatgtgggagacagtgagtctctctgagattttccagcacttccagaagaaagaaagtttgtgttaggaaggacaggccccagctccctgggacttcagggaggctggggggagctgcagtggagaagaggaggaggttgctgaaggagaagcagcctgaagttctcaggttgaaaatacaaaccttagccccatcctgcggaattttgggatttcattcctaggatcaccctatagacctctttatgattcagtttcctggaaaagatgatattatggtatggatcctaaacacagtttcacaaggaagttctgtgtcttttggcaggggaagaatagtgaacaaagtgcaatcttacttttaaaataaatcttgaaatgatattgcaagccttatgagatctctgataatctttttttatttgacctggttttaagtaattctttttattcttgatgtttttcttaaaagcattttagaatcattcaaccttctaagaaagcatcaaaccatataagcaatctaatctaaaaaatgatacctctaaaagttgaaacttttgtttattttgactactttttgattactggaaagaataaaaaaattttactctatcaacattggattatataaactgtaaagagcttctactaagacgtgtgaaaatgcacattttctttttttatataacttcaaaattaacagatactatactgtttagatacatacctgatgctagataaagagttcctgagaaacatgccctaaacttttggactgatttaatatgaaacaattactacagagctgagttaatcagcccctttatagattttggcgaagatgattctcttcatatgtataataatgaaaaccaaacttggcaaaagctcacaggtctacagtgactgtgtatttctttgcattctctagaatattgagggaggagattattttttactggtgttttactctcaggaaattagaattgcaagttgataaacaagttgatagggtctttagggcctgtgtgatcaatcaggacttctggggttcctgtaggtatccttgaagtctgcttgtgggttgtatagtccagagtgatcatgagatctttcacctcagaatgactgtagatgaaaagatacatttcttttgccagagcagttctctctagagtttcaaaaacaataattttgttctctcaggaacatagccctctcaggaataactccagtcggtcctcaaattacaaatacagaaagaatggctgtgtttacagaatttttataagagaaaaatgatctgtaaaaaaaaagaaatatatgcatcagaacaaataggaatttttaaaagaaacaactcctaagataaatactgaaaaaaagaaatgctctgataatataaatgattctactatgtactgaactcaataaagtctccttgactgtgagttggaagccctgaaattttgctggcagctctgcccctaagttaggtcatcttatgaaggacacattttattttatttttatttttttgtagagacagtgtcttgttccatcacccaggctggagtgcagtggcgcgatcatggctcactgcagccttgagctcctgggctcaagtgatcctcccaccttagctttttgagtagctgaaactatagacgcatgccaccatgcccggttatttttttaaattttctttatagagacaaggttgtgctatgttgttcaggacagtctggaactcttgggctcacatgctcctcccacctaggcctctcagagtgctgggattataggagtgagccaccatgcccagcctcaaaaggcatattttaaagcgtcacagcctcagtttcattttcggtaaaatgagggaattggattttatttcaaaattctattattttctgattcattgaattattgcaaagaacataatgaactcccaaatactggtgtctccatcctgttgaattaatctcagctttagtttatagggaagcatagccactagaaattatgttaaacataaattataaaaggtacatttttctaagtcatgaagaaatacataaattttatgttgttttcaaccttagtctgtctcttaaataccacatggcatactgtgtaccactctgttattatgtctttcgttttcagaattgttttctaccaggagactattattagggtagcccgatgacttggccctgaatatgggagttcatgtgtagagttcctccctctgtcccatcctcagcatttatgtcagtcctacagcacttagttaactatcagaaaatggatcaaaaagcaaacaagtatcccatctgaccgtgttaacagcaaaatcaacagatataaggcccccttttaatttcctggaggccgtcacctcgtttcttctgctgtttcactactgcagtcctttcttgttcctcagactctcgtccttcctcaaatccttctccttccatcaacatttatgtcatttatgtcttcggtgcgcacagaacttcaggtttattctgaagagaaataaatgaaacagaaaatagcttctgcactgggaaggcttaaaaatctcttctccctgaaatgtttgtgcatttttgaaatctttgtcctccatatggagtgaacacacacacaccctgctcctctattcttcttaaccctgttttcatactggaagagggcaggcacatgctaatcattcctgtccctattcagcaagcatgcgacttgctgaaaacctacctccttgaagcagcaggatgaatacagatagaaatgattagaggggaggaacttacaaatactgaatagctcatgtgcctgacactgtgttaggggagactctcagggctgagtagtactgtgtcatcattataagagaaagttttagaacggctcagagaggttaagtaacttgcctgaggccacacagtaagtgttagagctcagaatctaattctgcaaactttctgatttttcctttataaaagatcttattcaattttggaagaattgaagttattcttcattgttttttaattcatgaaaattgtatacaattctatgaagaaggaatctaatatatgaaattaaggtattattatattacagcatatcccaattttacatggatttagtatttttgtgttagatagccatgtattaggatagttctaaggcaaatgcagcagttgagataagaccatttagcctctttttctacatcatgttgtaggcaatcccttaggatgatatactacactaggggaaatgaaatttttttttctaaatttgtttttccagaagaatctctttaccattaaagcaatgctgctcatggctacctatataggcctactagcttctccaaacatcacatagaggtaaagagagaaggtaatgatttggaaggacatataagagggtgaaaaaaattctttcttttaggtttttgcttagaaaacaatgattgcgtgtgagaacaaagtgggttattataaatgttttgacacatagctagattggaatgaagatcaagggtatgaaggactcaacatcttgaccctagacctgtcccaggatcccactccaaggtctcatgtatgcagcagctccctcttgggcatctcctgttaccaacttcctcttcccatgagctgttattgccacttctgttgatattatattaaccttttctctttactcgataagagctcctggaaaattagaaattggtgtcgaagagtaggagaaacacaccgtgtgtggcataacaataatagcttacacctacataccattttggagcttacaatactgtttctcaatggttcctgggagacttgcctcattcaccaggtgaaagctcaaatgcagacttctgtgtcataccccacacctgatgaatcagaatctcagtggtggggggtacctggattagtggaattcagaaagtcatctcttcagattttttttttttttttgagatggagtttcgctcttgttgcccaggctggagtgcagtggcgtgatcttggctcaccgcaacctctgcctcccgggttcaagcaattctcctgcctcagcctcctgagtagctgggattacagtcatgcgccaccacgcccggctaattttgtatttttagtagagatggggtttctccatgttggtcaggctggtctcaaactcccgacctcaggtgatccacccacctcggccccccaaagtgctggaattacaggtatgaaccaccgcacctggcccagatgatttttatatataccaaaattataaccattgtcttgtaaatattttcatgtatgttactttctttttctcttttaagaaccacctgagctaggttagaattattatatactcattttacctatgagaaaattggaatctggaaaagtgacttgcctgaggggacacagctaacgaggtgcaggcctctgactagaacccaagtcttttggcttggccggacagtctctgccctttccccactctacactgttcccatagactgaagggtaggtctgtgcacacacgtggatataattgtggaggacaacacaggttgaaattctttcgtagaatgtgcttttgatgttgtattatatctaaagattcatcaccaaatccaagatcgcatcgatttttctgccgtgttttcttctagaattttcagttttgcactttatgtttaaaatgtaatggtctatgatccattttgagataacttttgtaagaggtttaaggtctgtgcctaagttaattgtggacgtccaatttttccagcatcatttgttgaaaagaccatcctttctccattgaattgcctttgctcatttgtccaagagctttgcaattcttgatccttgtaattaaagtactttatctctgctctctgttttaaaaggcagccagatcagtccagcatttaataattatttgcttaagatttgaaccccacttcttaggaaagaacatgaggcaagttgtagattaggatagggaacaagataaaccactgaagagtaaactaaaatagaatccatccacactgaactttgtggccttggcttagagatggggaaactaggttctagatctgactcttatcacttcaccttttcagcttctgtctccttccctgaaaaatgagaggaatgttgttagacatattccatgtttctttctttttttctttttttttttttcttttgagatggagtcttgctctgtcacccaggctggagtggagtggtgcaatctcagctcactgcaacctccacttcctgggttcaagcaattctcctggctcagcctccctaggagctaggattacaggtgcccaccaccaagcccggctaatttttgtatgtttagtagagacggtgtttcgccatattggccaggctgttctcgaactcctgacctcaagtgatctacctgcctcggcctcccaagtgctgggattataggcatgagccaccaccgtgcccggcctccaggtttctaattatatgattccactctagggcctcagatcatggtaggggtaatgaaaacttctatctgtgaaaggctttcccattcaggcagcaagcttgccctttcaagactgactcatgaggattcattgcatgaattgtaactgatccatcccacgtcacttcaccaattcacgagagtaaagaaacacacgcagagacttaactgtacaatttttaccaagtcccttgcttgctcagacccatcacaacctacgtcagtgggagtcatctccccttaccccacattttcatctcaggcactgacgtgtctttgtttccttattccaacatgggtcagtactgtttcttttatttttaatttttttctggggatacaggatcttctctgcctctcttccccccttctcagtctctcctttaaactctctttgccctaggctgaccacactccttcattctcaagaacacgcagcttatctgttttccatgtttaaggcagccaaaggcttttaaagataataaaaatctctccactgcaattttgagctgcaaagaatttgctagatttgctggcataaagagttacaggaatgttctcctagtacttgtggtctggaatctttggagggtcagggatctaccagaaacacagacatgtgaaaataattataatatagcagggggggcgtggatgctgtttccggggtgaggaggggaggcatcaaataatttttgctgaagaggtaacagttgagtcttgaatgatggtcgggtaggagtttagcaacagccaagagtgggaacgagggtccgagatcaaggcagggggtaacacactgcgcaaagaaagaaagagtgaaagaggatgccattttgaatgtagatggcttagctcttactcacaggtgggcaaggctgacttaggtggtttggctgtctggacaggtgccccctccttcactgcattgttctacagtccacgtgtgtccttcctgaagttgctcccttcttaactctcaggaaatcaagcatacactgttaagactaacaaaataagcatgctttgctgtctagcatatagggggcaagatcttagcataacatgtgtgcttgaagacagccagaagtggaagagacagaggacagctgggaatgactcttgaaggatctgtaggtccaggagggaatggctcttgaaggatccataggtccaggtcacgaggaggccttgcatgctgctccaagaaactggacttgcctgcataggcagagggtgactgttgaggagtcatgcagttagagcacatggaaggtagagaagataaagaaaggtgaggcaaggagactagaataggagctgactgcgagttctgatgtgaaatggagatacagatactgatagagtagcagtgaggctgggatgctggggaggatctgagagaatgttagcaggaattgttgtgctcagttgaatatgatggggcaggagaaagtcaagcacaatcccagatttctgacttgagtgatgacaggtggcattagccgagataaggaattcagaaagaggggcagttttggggaagaccatcagtcctatctggaatctactgcttttcagaggtggagaggaccagacgcagttagatatattggtcttaagctcaattgcaactcaatgcagatgaaagggcaaagaaggagtgactaaatactctgggaagagactcttaagggggcattcagttcagttagtaacaaatattttacaaggttactttgttaggcaccgcaggacaggcaaagaaaagtctcaaacaaagaaccctactttgttttaactacagctgtggactcaggttaaacttgtatgaaaagtgtttccaataattattgcttaggtaagttgtaaaattttggtctataagtttatgtctgttttcctggctttctctgaggtttgacctacaaataagaacttccctatttctctctcgctctctctgaaattaatcatgaggttaaaccagattctaggagatgatatatacatgacagttgattcacctgttctttagtttcggtcctgccttatgcttaaacataatatggttggttatagcagtccaaaaaaaatggaaggtacacctttatggaaattcccaatcttaggaactaaaaaaggagagaaaatagagaaaagtttacttactttttagagtaaaaatcccttttgaaagatatttttctgtatgtcggtgaactatttttagacatacacactcatacttaactacaatcactcaattaactgctaaaccttatgaaggaagtagtatttgaaaaacatttaaaatatttaagaggatatttaaataaatacttaagaaacagtctatgaacttgcatgaagaactctacaagtacaatactttccttcggaaattaaactttgaaataaaagatagcattttaaaatgtgacttgtatatgcctgcccaaagtcctgataggtattttatatcataaagaattgggaaacagtaactaaaggcaaataatagtgccttgtttcaccaggaatttgcatattgtgctaatattaatgtaatctcttagaaaattctcatctaaagtgtgaggtttcttattaaaaaaaatttcatgggttcatgtagaaaatttttcatgggtctctttatttaaacattttaagttcaattcctcttcagttatatcttagccagtggaatacagataatgcattttgttcttctttccccagaaactgaagtgtttactcttatggactcagaggggcttttcaagttacttcaatttttacagctcttttcatatcccatgtgtggatttactgtgaagacttatgaatgatggaactccagcagcctcaccatggccttactttggctttggtaagtatagaaaacctttggcaatgtggttgagacctaagttttaacacttaggcaaaactttttagcaggagccagaatatgaataaatatgaaggaggcacttgaatgcaaaacacactttacaaattcatagcaaatttgagagcattttcaattaagtatatatgactgcgggttgtctcccttgaacaaattagttctcgtttgtaagggttatatcttttaaagtatcgatcaaatcagtgctcaaggtagaactgtaagtaaagttacaatcctaaaaccttttgggcaatggttctaattaatataactaatattttagcaaaatatcctgggttgtaattgaaagaaatcatctgggtctgaagaatacctactgagggcagccctattaagattcattctgagacgggttaaattaatttcctggacttgcaaagcagaaacgggaaggttttccttcctcataagcctgcagggtttggtgtttggccctgtcgagacccaaaggctatctaggctgattaacatatatataattaaagtgcaccagctagaaaggcagagccagtttcatttggctctgtactactgtgaaataaattgtctgcattgtttaactttttttttttaattagttttccctggacgtcatcctgctgccttctttaggaatattgcttcctatcctaagcagggactagagtagagaagctttctccagcattcaaactagattttctttccattcatatcgccacttttcataacatggtaagaaacactgtaaataattgaggtgatccatcaagagacccattctggataatgaaaaattgcataactcagtaaaagtcaattaaaaaccacaaactccagagccttttgctcagtgaagatttattgttatagaaggcaactaatacaatagatttgtgggctcgaaattttaaaaagttctaaaaaggcagttaaagcttgacaataaacttgagtaaggtttacacaatatcaaagtatattagttctttgaaatgaaaaggtattttttttcttcctttaacattgagatgtctgagatgtcaggattttgtagcattcttagaaacaacatccactgtgtgggatactttttttccttctggagttttaaaccagtctgactctttggttgtgcctatacaatgaaaagtctacaaatgaaatgagagaagtcaggatattttcctttgttaaactaagtagctgaataattagaactacctagataaaagactcaaaatgtttttgttatctggttgcctggttaggacatagccaacatttcaatggaatgtagtatcttgtacaactgcatataattttttaaaaaataaacaatgactttgtttctttagatacatcaaatgctgcttgagtggccaaagggaaaatgccaactctttgaaatgtagtatctgtagcacttttcttctttcagtagtttttcatgccccaaatacaaactttaaggagtaacatctatcctcaaaacccaaaaatacccatttgttttgaggttcacagtccaccagtataagttttaaactgcgccaaaaggcttaggtagggttcagcagtcaggcatgacagatgcataattctaaccaacagtgcacatgtgacatgcttcctactgaaattaaactgccaaataaaaaggaaggattgtgccctttttaataacaaagaatgcagtcgttagaattcttcagatttggaattccagcagcactctagtgttttcttcttgatgtgtgacaagaatgaataatatcaaaaataaaaataaacctcatctaaacaagcagttctttgactttataacgttcaacatcaaattctcaaaatactcaagaccagtaaattatcagagctgaggaaataacatgctgaggacagaatcaatttttaaacattttgattgattttaacctgctagcattagttttgttcatttctgtttagacattgccacttcaactgactactagggaccatggtatttcatattcatataaatatctgaatttgacctcataagaagtcccttgggtctataatacttttattcttgtataatctgaaacaaatcctttccttttaaaaatcaaacagaccacgttatacacacagttgactatttacaaagcacccaattaaatcctacttaattctttcactctaaaaattccatctaacttgtgtgtaaagtacccataacattaaatgcataatgttcacaaaccctgatagtcctatctaacctagaaaatattaccttccttaaggagaaaaaagagccttaaaagaaaaataagagtaaggttttaaagaaatgagaccagaaatcacagtacaagacagagaaatctactttaatattcacatgtaaaagttacacatcacaagagattggacagtagcttagcgtaacatagctatagtgaaaatcatttttataaaaaaataatctagatgcggtcatcagaatttttggtctgcttaagttaatgtttgaagatcgacttttatccctgcttgaaggatttgccattatgccttttttttctcccactgttgcctattaattctttggaggaaggaaagcagaaagtgttcatttccaagagtttgtcctttggtagcaagcagagaacatttttttcatttccatgatttaaataatctgtacagacatgaaacttagtgacattaagctttagtgtaaaatgaagagtaataagcaattttttttcactttgataaaacagcagatttcgtaaactccttaaggatccaagcatttcctcatcccatatgcaaaatcattcagaatccattttgacctcagttgaaaaacaaaaacaaacacttactctgtatatattacactataaaaccctgtacttaaaaactgataaggtgtattttcaacatgtatgcttcaaatacaaagatttcaatctacatttaaaaaaacacatttgaatggactcagaacaagtttaatttgtgattaaacatctcatgcaatcatgcaagaccactagctataactgttacttccgagtctatactgggcaaaacaaaagcaaattaagagccaggccaaacagaaaagacattcaagatatcaagagctctgtaattgagctgaaaaatgattttccaaaagaaatattcccatagattaaaaaaaaacacacacataatatttacaaaaaaatatttaattaaaaatatcttataattacagtatctattaaagcatatactttctcacacttatagaacatctctatatatacatggtatgaaatgtcactcatttatctatacaatatgtaacattcttgcagagaaaagaaagttctctgccccgttataatcatctattttaaacaatagatgtaaaaaaaaaatatctacaatgctctggtagattagtaaagcttcaaaacaaaaattgagctccttggtcacaaagtaggcttctaaagtcggatctactcttgatcttctatttatcagtcctgtcacacttaagcttaaaagtttaactgcacctccaaaaaacacagaaatgtacaattcacagcagttataaatgaagagacaaaagagaatacgtatgtagaatgtttatgaacgtgcaaagaaagaatgaaagttgtatttttctttcctctctctctcttggaatgacgaatgaaaacgtttctaggttggccgatgttttttcctttcctccggtggctttttttctctaacttctgctcttccccctccctctctagtgctcctggctcgggctcaggcggccgcacacctgtggaagaggaatgaatagagggggtgtgtgaaccttctcgctgcagactaactggcgccaccgaccaaactcaagacatgcttgatcaacaacccaaaacaaaccaccaggtcagacaacacccgcccgcggccgggccaggcgccgagcaggcagctgcggccctcgggaagcccggagaggggacccactccggcgccctgcccgcgtccccctttgtgggtgacagactgcacgggaggacaccggggcagctcccatgcccacgagggtgccctccctcgggaactagggaaggcagaagagcccgctgaccaccagaaaaaacacggggacggcggggacaagggctgacccgtctccaccgagactgaacctcgagttctaaggctaagtacgggtttacttgctacttaggtggcagggagagaggggatttacttccttgggagtttgctctcagaaacgctgggggcaaagaacaccgcggtgcctggccccggaagccctcggggacgggcgtctctggtgaccggccacccgagacgggaaatgcgcgctcacctggacagcgcggctcagcggcacagaatgctgtcgccctgcttgttcaccgcgccggcctggaacagcaaccgaacaccaagggaaaggttagcaggcgcaaacaacgcgctcgacacggtcctggattgtcctcggaaatcaggctggcgcgccgacgcccccaccccagcctgtagccgggggggcccctccgggctcaggcgggacttgacagcccagggcgcccacagccccgagtcccgccctgcgcgttctcccggacccgcgctcgccgagcccggccggctgctggcggcccgggggagcccggaggagcagggggagggggctgtcattcctggcccgcccctgcccggaggacggtgagcgcccgcgtcccgccaccacgccaccaacctcccatcccccgcggcgtccgcccacggccggcgcccggcctctcaccgggtcggtgttgagcgcagtgagcggggtccgcggcggcgcggctggacaggtcccggccgggtggtgtggcggcgcgggcggtggtggctgcctcagcagggccgggtgcgtctccagcgccagctgcaggtccaggatgtagtcgataacgtgctgcaggatctccactttgctgactttcttgttgggcgggatggtgggcaccagcctccgcaggcggctatagcagtcgttcatatcgcactgcaggcacagcgccggctcgtcggccgccgcctcggccgccttacagcgcgctgccgccgccgccgccgccgcggctgcggagccacccaggctgtggccgtgctcggccaggcagcgcagcgccagctccccgccgccgcagcccgacggcgccttgcggcccgaggggcgcaccgggctcaccgccttcatcgcgcgcgccctgcgctctacgcgagcgaacccgctggggcgagcgagggaggcaggcaagctccgggccccgtccgcggccggctccgctccctttgcctccgcgcccggcgcgctcggggcaccgcgacactcccgagcccaacaattgacgggagggtcgctctgggttttacgagggaatctttgctcagtgggcgacactcagcccgagcccaaaggaaaaaaaaagcaaaagcaccggaagaaaagtagcccacccgggtgtcctagtcactcccttcggagctccgactaagcccgatcgcggccgccgcgctcccctagcccgggatcaccccactcccggtactactcacaaccgcgcctcctccactacgctctcgcccggcccgccgcgcagctgtatttatagagccgtgcgccccgggggcgggaccagcgcgcgggccgggtcgcagcgcgagccgagcggagcccgctgggcgcgcgggcgggggcgcggagggagaggcgagggcgggggctccgggcggtgctggggggcggggagtccggctacccgagtggaggagtgggcggggggtctggagtggccagccaatcaggcgggcagtgccacctcggggaatgacgctcgggccaatgggaagggcactccattccgtcaacgctgtgggtcggggttctgagaaaagagagctgagtgggagtcgggccaggctgatgtgtgcccaagggaggggaaaagagagagcgaagttcctgcgaagaactgcgggaatgtgcggccggaattcactctccaccgccccccttatcccgactaggctgctgagggagcgcctgggccctgctcgcggataccctgccactcctaatagcacggcgcccagggaccctccgccacccatcactccatccgtgggattccagtgccttaagaaagacgcgctgttcaagaaggcacgttcattctgttctatatttccctcctccgtttcattattcgccttttcacatttgccgaaaccataatgatggaatggaatgtgtagcctttccgttttctttttaaaaaatgctaaagcttagcaaaagtagaaaaaaaaagaaggaaaagaatgccgaatcgaatgcaggtttttggtgaagggaatataaataaaacaaaaacgtggggggggttcttttaccccatctaaatgcaaaagtgggctcaagaaatgcagttgccttgcgcattcaattagagcacgtaaagattaaaaatgcatggacacggaatatttaaaattccattatgacatataatattaatctgttttatgtaaaattcatacctgtaacttaatttaggccattaatgcacagcttcacgtattagtcagcgtaccccgctttaaataaggtgatgagaatgtccagagtcgcctcctttgacagcaaagcattaaaattcacacttccagtctctgggatcccgcttgggccccaccctgcaaaaaaaagcctgttaattaagggcgtttttgtgttagatttcttagagaaaagctgtccttcaagggttcaaaataaaattgcacaatgagctttggtggagcattgtgtgtacccttcaagaaaaaattgagcccttcagatgagaaaggtgcataaaaattctcagacaatggggaaatgaattttgagtgccttcactctacaaaccctcccacctttagacacgcttggagatgaattaacccaagaattttcttcattcgtgtacatgacatggattggtgtcttcattttcatagataattgaaagaaagagacatggacctcatttcttcctgtctacccctatatggactttttctacatccattcccagaactgaaatacctgcaccaggcagatattttgtttagctatgtcagtgctttatgactatcgcactattccccagagcacattcctttctcctgatgaaatgaggagcaactatttaattctggtttcacaggtagatgcaataaccctcctctcccctaatccttgtatgttactgcttctaataattgtttggaaacaagtgccattctcatttatttatgtgcatacgtagatggtctacatacacattaatcgagaaaatcagaattatgaaactcagaagggctttcttctaaagacaggcatagtcatatacatcattaaattaatgcaaatacagagaaaatgttgtaattttaaatgggaagtcggtgaagccagcactactggttgtaagctattatcttggagccagtcatatgagcacagacgataataataaatggatatatgtacagatgttttgttccattgatctttctctttcctagagtttaaaatttgcttccaaattcaaaacccaagactttcctctgtttggcaaaataaaactatgctaatatgcccaggacacacttacatttaaacattttacatatcctaacgattaaaattaaaatttaagttttgaatacgtaacacaaaggaagaatcatatcgacctttttggaatttgctaaatctcagaaagccatgccttgggtgtgacaagcgccaaatgcctaagtttcaggttttgttggagatgctctgtgtgactggcttaaagttagaaagactgagttactctgtgtggggtggggtggaagaggtggtttcaaaggaatgtacctcagccacaagatcaagaatacccaggaaagatgtgatccgtaaatcctgctagcagagtaggcagaggcagttactgtgctccttgttttgaaggttggaaggcatgaagacattaaaaaattaaagtgctaccatatactatgggaataaggaatacaatcctgcacgttttggtccatgaaaccagagagtactaggggctatgcaatgtatgtttttgtattcttagacatagacacttacatgacatcaaagctgcaatcatggaagattcctggcactgataattcaaaacagtttacccaattatcactcagattttggataaaccttacaagctatgttatttctactgtgcagagaaggtaacttagtctgttggtgactcttttacatcaaagtgtttcacttgcacttgtaaaagtaaaatgggctaacccaaatccttttgtcatggaaatgctcgagactcccaaaatatacctcagtaggaacctagaatgaaacattcataggagaattgctagaaagccgtgatgaccagagtcatggatacacccttcctccagacaaagaggtctgctgtcctccctgagatgtattctagctactaaatcaggccctcactgaactgcaacacccaggcctttagaagtcatagtcaccctgtgtttacatgaagcaagggtatggaagcatattgtgctcttcattcccagtgcctttttaggacttgatacttgtttctccatagcctccagggaaacagtgagtgtactcatacacagataaacgtgaatgttccaatgccttggtcactctgtagatttgtcgtcacagaaagaggcacatgcattctttgagggcataagaaaccactatgtactctgcagcaggactgtcccttgctcccaaagagtaagttgggcaatgtggcaattcaagctcaaggctgctttatcaggcactaagtgttacaaaattacttgtgctacccttggattgctgatactagtcccggaaatgctgataaccccttagtttgctaggtcctggaaaaggcttgtaggaagaggacgttgtacgttgaacatggctgggcagatgtggctgtcaaaaatgccttgtttggggagttttaaaggtagttggtttaaataagaagtgactttttgaaagccccccttagattaaaagacagaaaaatggggagaaataagtggaatttgtttttaccttaggagatataaacagcatggactctgaagtgagacagcctaagccccaattttggcctctttgcttattagttttatatcattcagctgggttcttaaattcctatacctttcatatttggaatgattaaaattgcatttacttcataaggtgtttatgagatacacatattatatatatggtctctgtaaaagaaattcagtaaagttcttagaacagtggttggcacataagtgggcaaaccatgttacaatgtattaccatttttggcaaatatctctcagtctgtggactgacttttcatttacttcacaatcttcttttagagcagaagttttgattttttttttttttgagacagaatttcactcttgttgcccaggctggagtgcaatagcatgatcttgtctcactgcaacctccgccttccaggttcaagcaattctcctgcctcagcctcccaagtagctgggattacaggcgcccaccaccacacctggctagttatgtatttttagtagatatggtgtttcaccatgttgttcagtctggtcttgaactcctgacctcaggtgatctgcccaccttggcctcccaaagtgctgggattacaggtgtgagccaccatgcccaccctaaattttgttggtgtctagtttatcagtttgttcctttatggctcatatttttgatattggatctatctaagaaatctttcatagctcaggtaacaaaggttttctcataggttttcttctagaatttttatatttcttaggtagggttgcttgcatggtgtgtagcttatgcagtcacacagggtcctgcactcagaagagctgtatgcttgggttagtgctcttgccttcttgaaattcttagtaatttttgaacaagggaacctgcattttcattttgcattaggacccacaaattatgtctccagtctttgttttctgttttatgtgtaggtctatgatccattttgaggttatttttgtatgtggtgcaagatatgggttgaaattaatattttgcatttgtagatccaattgtttcagcactctgtcgaaaagtctacctgttttccaaagaattgcctttgcacctttgttaaaaattaattgtgtatggtgtgtatgtgtcactctgtttctggctgctaccacattttcttgattactatagctttataataaggcttgaaatcagatagtgttgaggcattgatcctccagctctgttctttttcaaagctgttttggctattctggggatattgcatttccatatgaattttagaatcagtttgtgaatttcttcaaaaaggacttgtatccaaacatataaagaacctgtactcagaatactgtatataaagagctttcaacacaataataagaaaataaacaacttaattaaaaagtaggcaaaagaacatacaatccaataaagaagaaataggccaggtgccatggctcacccctataatcccagcattctggaaggctgaggcaaggcgaattgcttgagcctagaagttcgagaccagactggggaacatggtgcaaccctgtctctacaaaaaatacaaaaaattagctgagcatggtggtgcacgcctgtagtcccagctactgggggggcggggtgggtgaggtggtggtggtggtgctgaggtgggagaatcgcttgatcctgggtgggtagttgaggctgcagtgaactgagatcgcaccgctgcactccagcctgaacagtagagtgagaccctgtctcaaaaaaaaaaaaaaaaaaaaaagaggaagaaataaaaatggcaaatgagcacatggaagatactaaacatcattagtcatttgggacatacaaatccaaactataatgatacaccattacacacctgccagaactgccaaaattaaagacggaacatactgagtgctggtatatggagcaactggaactatcgtacactgctggtgggaatgtaaaatgaggaaaattactttggaaaacaatttgacagtttcttaaagttaaacatatagataccatatggcccatctgttcttctcctaggtatttacccaagagaaatgaaaccttctatccaagggccacaatggagcctgagaatgatgaatgtgtttattatcttactaactctgtatcatattgttgtcagctaggtatcacagcatgaactgaacggtagtgaaataccctccaaagcagtcatgagactaatttaatatttcagctattgtggttactcattaacatatttcatcacttgttggaaatggactacactaaaaaacacattcactctttcttggtttgtatggcatgacatggatttaaggcttcaaggaggaccctatctaattatttgaaatgtttctcccttttgcaaaaactaaagccatgttctgtactcttgcttctctgcttcactcctgttgcagcctctgctgccttggtacaaacacccactgggtggggaagataagaagcctcattattccatattgaagatggtctactgttttcttttcctctccacttttttcttagcaagaaaagaaaagaggctctcaagattagatatatcccactgctatttccagagcaaggagcaaagattcccaatgggtaacatatttttgcctttaaaattctgtggttcaatccgtgcaagcacagcttctccatctagcaagaggttcacagggatggaatgaagattaactgcttttgaaagccccaggagaaaggcagtaaatgaatgatagggggtaatacaccagaatctagtgaatactagatactgaatgtccactgatggctataccattgttgaaagggggcttgtaataggtaaaatggttatgaagatgccaaatagatcaaattggtgctttaactcataattatagtttagtagagaaatgcgagacaagaattattattattccttaaaattcattcccatagtgatatgcatttgtctgctacattctttctttcagcagataataccacaagtgaagtcataaataaaagctattctactcatagcagaaattatttctagattcacattaatgaaaaagttttaattttatttttctttcttttaaggtgaatgcaaaataattccaaaatatagaaaaagcgttattaaatgtattttaattacttagagaaaagacactaaataaacagtaaattgctttgcatcttcaaactgaatactgaatgtgggtccatcacagtaaatcagccttcactgagagaaaagactttcccattttattgacatctaggtcatggttgctaagaactgatacaatgttcaagaaacagctgccttttttctcccacaaagaggaatttctgagtcatttttgtagctccctacacagttgtcatcagttgttggataggctgtgatgtcagtgaccttcgtaccagtagtggaaagtgactgtgtgtaaagttgatgaacagtataaaaagtcgtatgtgaaataattgaactagtacattttttctactatcataacatgtgcaacaaagcactaaaggaatgttaaaaatcacaattaaaggaaaaagaactgggttaactttgaactttatcaacattggcaattctatattaaaagcctccagtttaaacaaaatcatctctttgcaggggattacaggtataactattttcccttgaatagaattaaatcaaaagtataatcttaaaagactaaaagccttaatgaaatatattttcaaatataactgttcaatagaaaaatctaaaagtttggtcaagctgtagacaatacttggtctgataaaaccatacttaccattttaaaaatattttgttcattaggtcaacattaaaatacgaatctgtttatattatgttctaaaaataagcaaaatatatgctatcaggcaaaataagacaattactgtgacaacattgcaaaaaatgcaacatatattgtcatcaaggcttgtggcataggattgaaattgtatcatatgaaagtaacttgtcgaatatatttttaacattgatcttcaacccactgttcagtctttatcaggaatctacaaactgtaataaataaaataagtgtaccctttggcagattgttaaatggatcatttttggcaccttccaacattgtccattagcagcctttccagaactgccaactcccaactctggagaacacggttgaaaaatggtaatacatttttaatccagcttctagaagaaccatcctcctataccaatgaggtatatgcttaacacctctatattatgaattctagcaaccctatctcttcagccccacttttcaggctctctgctaaccaatcttctccaaaatggtttcagttcaattaaagtcaattcaagccaattccacacaaacatgtatggtacatttactatatgacaagactgtgttcaagaaaaataagtcctttaccctcatggaacttgttacttagaaaatggcttaaacaaattaaaaatcagttgatgcaatacagtgtgttctgttcaacaatactggcatgcagagggcacagtggggacaaaaaccaaagcctgagtcaaaggaaatttaatggaggaagagttactggagcttgattttgaaagagtacttcatcagcagaagatgttccatggtagtgaaaacagcatgtgcagaagcttggaggagtgaaactgcaaggttctcgcttgttctttgctctgcttcagtttaaacactcaactttctttttttttttttttttttttttttttttttttttttttttgagacgcagtcccactctgtcgcccaggatggagtgcagtggcgcgatctcggctcactgccagctccgcttcccaggttcacgccattctcctgcctcagcctcccgagtagctgggactacaggcacctgccaccacacccggctaatttttttgtacttttagtagagacggggtttcaccatgttagccaggatggtctcgatctcctgacctcgtgatccacccgcctcggcctcccaaagtgctgggattacaggcttgagccaccgcgcccagcctcaactttcgtttccttatattcaattagtattttaccttatctcaggacactctatctaaaacactttccactctctcttcttccaaaccacagtcatcaactcttgaaaaacaacattgtaggatttagtgacgcatggttcttcattcaggaagccatctatcattaactctctggcaatgcttattttaaaataactttaatgattttctgtcttttaattatttattttctatttatttatgtatttctattttctttttcatagacaaattgtaaaaatgtcaaaaaacataaagataaaaatatcagcaaaacctaaagatgaaaataaaagtaatccacaaatccacaccaaaaataacctctgtaactattttattgtgcatatttccagattttcttcatgtatgtattatgcatgtaaatattatttattgaacaaaaattatagtgtgtatttctttttttggacatcaaatttttcactttgcataatgtagagatatttccagagcaatagttacttttcattgtcatactttttatggttacataatattctattacatagacgtgccataacttatttaacaaatttttaaaataaatattttagttgttttcattttttttgctgtgtactcttacatgtctgatgtgcttattttatctcaatgttgcaggacaatgtgcatttgttgacataatactagacaattcttttcaagctatgtcaggattgtgtgtttcagatctttgattagagcaaagcatcttagaggcaaggccatttctttcttatgtttttacaggtcagtaaagagaattattcatataacaaggctgtccaggtgggttggcacaatctactaggatgacatcccaatatacagttgtttagagatgacctgcagattttgcgtatgttcagagagtggctggcctgttgacatgggaagcaaaagggctggagcagagtagtggtgtatccattagatcagatgatgtcccaggaaggttctagtacacttagcaaaaggctttaggagagcaactaaaactttaaattataaatttgctagatattttctcaggtgaggaaagtagtgggaaagagaggctatcggggtagaaagaagagcatgtgggggttctgcaagagcaagaacaggaactgtgatgttcatgatgagtcggatcatgttaggacctctgctgcccctgttggttctctctctactcagcgttcttcgctaggctcaacttcctattctttcctttcaactctttattttcttgctcaatcatctcctacaaccagaacataaatgcggctacaaacaatttggcaatagagtttatatctttcctgcacaccagctaatcactatatttacccttattgacccaaatctttttattcccctaggttggaccagttttcttttgaaatcgtggtaactgctaaactgtaatctcatggcaaaagagaaaccctctgtcctattggtaaaaatgtaaatgaggcctaagtaaatagaaaagcaatttttatcaagaaatttcttttttgataaaaagaagtttctttttagagattcagatgctcatttagtttttggaatggccaaacacagagttatctaatttaagtaagtataagtgttctattcaacaatatgagttttaaaatggctataatctcaccaatacatgttgtttattttggcaaaatttgtcttggaataaaaatattcttagaataaaaatgatttctcctgtttccagttggaatatgattaatgttttaacttgttgatgaaacagcagttttataatccaggcaatcagaaatctattatttaatttctgaaaggacatgaaatggtgatagtatcctgcagtagcgtgtttgcctaggcatcaggctcctggagcatctttgtatctgttctggtgagctgaagaagattggctctaattttcttaaactgctggttctacaatatttatggcaggtgttataaaggggcctcctccttccttctgacttgagtagcctaaaaaataagtgttatctgtcttatgtcttgatcaaacttagaattgtttcaaaaagtagaaagatgtgatgaccatagttctatttctactgttcttgtcactaattttggagataatcctagatattaggggtgagtaaacaggtgaagctagtgtggtagccagctccaaagaccatttttcaacttgctaatgggatggtacatggcagagaaggggaactggctcagaatctccctgctattctccttcctgtgtcatgaataaaaatcacacatctagaacaatatgacttctctttgggcccatttaatttttatgattttaccaatgattgtaaaacatgctgaataaagggtattttatagttggtggtgggtggagaaaaagtagaatggatcagcaattcagaagtatcgaggcactaactaagcaaatgcccaaatttttcagatataacatagataagaaaatacaagggatgtggtcagggatccaggtatgacatttaggaaagcaaatacaaggaggcaaaaatattagagactgtattttgaaccaatgagctatgttaattacagttactagaacatgatctatttactaaatacatggaatttcccctacattcagatatttaaagtagaatattatgatctggctaggtgattgaactggaaattatctaggtctcttacaaacgtatgattctgattccacagccttcttacatcactgtgctggctatttcttcttaatgtgcaacatccaattagctttacaatgatagatttagtaaaatgcttcactggacttcacttctgaatacctaataccactttagtaaaggcagccaagagataaagaggcatcttggtgatgaaggtagttggcctatatcaataacactaatattttattttgcaaaagatttagcacttattttaaggcaacgagtttgctatgtgcatgtttaccatctaacacaataatgtcatctgcaacttgggggatattgagtagctgtgatcttaaaacacaaagtttggttctaaatgatcaatttttatttctataaatcatcaaagaaaaatagacccattactctatagttttatcatacagatgaattcttgttatcttccacaattttaccgacttgcttttttacggacactagaaagtagagtctgtaaggttctaaaaagaatttgcaacaacttacctcatatgcaacagagcattggcaaattcaatcttctaattaaagcaggaaaataaatagctaatttccctataactgtgttacttaaagtttacaatttagagaagtatatgcattatttattatttattgactatgtattaagcactatgaaatggctctacatatagatgtaacctttaacctcacaacaattctgaaagatgttatctcaaaatgaaagactaaaattagttagcagttgccatcagtaaaggtaggagaagaactttaaaagctgggtttggtgactcacacctgtaatcccagcactttgggaggccaaggtgggctgattgcttaagcccaggagtttgaaaccagcctgggcaacatggcaaaaccctgtctctacaaaatatacaaaatttagccggccatgttggcatgtctgtatagtctcagctacttgggaggttgaagtgggagaattacctgagcctgggaggccaaccaatatctatatagataggtatgcatccacagtatacttagtcttagaagtctaaccactaatcatttaaatactagtattcatgtgcatgctatactttcaagcttaatatcaagccaggcatggttggggaagaatttgtcaaaaaataaatataaaaaccccaagatgagcagggcaaactggttctccaaatatagcctcttaggagagaaaggaggagtagagtttacccagccaagtttcgctttggagtactcccaatgcagtgtaaccaccacagccgctttggcattgatgttgatcagagccagcaaaggcgagggtggagcccttcttctgacaatgaaaactcttcactgagtttggtgagaacaacatgagctcactccctaaaagatctcaaaattcaacagaattataaatcatgagaaacatattcttaactctggtacttcattttaagccgaagttacatacaacgtatctttttatgaaactgaactatataacttctgtaattagcacattatctgaagaaaaaatcagttgatctggggaaaatgtgactaatcctttgcaaaatattctggggaaaaaataaataaataaataaataaataaataaataaataaataaaacctcatagatccctgctctgagaagtaatgagacctgagacctaatctgactgtggtgctagctctaccatggactgagtgaggctcatttaatcttctctgcttcaactttgtcctcaatgcaacgagagcataaaactgattgatttgagggctgggtgtagtggctcatgcctgtaatctcagcactttgggaggcccaggcaggcggatcacctgaagtcaggagttcaagaccagcctggccaacgtgtcgaaacctcgtatctactaaaaacacaaaaattagccaggcgtggtggcacgcgcctataatcccagctactcgggaggctgaggcagaagaatcgcttgaacctgggaggcggaggttgcagtgagccgagattgtaccactgcactccagcctgggcgacagaacaaaactctgtctcaaaagaaaaagaactgattaatttgtaactttctgctcaactccagtattatatgcttccaattaattaattaacatgttcatatgaaatcttctttttaaacaaatttaagttgaacggtattatgatttgtcttccacgggaatgacagccattccctcaagcaagtttttaagcaatggtcagtaagatattgagagacataggggaagagcctctggcggctgtgttgagaccattctgtggaacaaaagaacagaaggaaggaggaggctactgtaatcatccaggctttgaccagggtgattctgcagaggtgttgagaagtaactgaatgtatttggaaggcatggccagtgggatttgcctatggagcgaatgtgggtcatagagaagagtcaaaaacgattctgcagcatttggtctcaacatctggaagggttgactttgatattgacagagaatcctgtgtgaggagcaggtttgggggaagaagagtttaattctgcaaatattaatttgagatgcctactaagcttaatatggcaatgttgagtaggtaattggacatctaagtctagtgttcaggggaggcatatgggctggagatatacatttgggctggagatatgcatttgggagtgattatctctacgtgaatggaatatgaaatggtaagactggagaatgtcttctagggagagagagtagttagagagggggtcccagagccaagttctgcatcccttcaacgttccgaggttgcggagaagaggaggcagaaagtcagcatgagaagagtggccagtgagaaagagaagagaaggaaagaaatggtttcaaggagcagggagttcctcagccaggtcaaatgctgttaacatgacacagcctggaagaaacctcacaagcaagggaggagcccattaaaatgggaggtgccttatctacatcatcttgtgcgtcgggacagcaagcacaggaaagaaagacgacttttaaatttgctatattcagaatgtagataggagcatatcaatttgtgtaaaaatattatcacctgtttctaaattcagtctgctaagataccatctagtaatttctttcaagaaaaaatgcttttctgtgttttcatactgttgatacagccacccaaagtgcctactttccaagtggaagaatgcattgtagaagaatcttttccaagtctttaagtcaaaaaatatatatatttttctctttttcttacttgtcatttgaaattattcctgggtttccttgtaaataggatagatgaaatgaatgaatgccctctaatagaatgtccgctgattaggggacacactccatgccccacttcacaaggctctttgtagcatgttcatcgccctctgagcctcctccttcagctagcacacactgatgctaagatctgtaatttaaaactcctcttatcttctaccctcctttcatctctgactacaccagagaacattcaggggtttgtcaggcggcctgtgaggtcacctgtgtcttttgcacttctctaactttggtcaggaaacagcgctgccagccacttggaaactctgattatggatctggtctgatttgcccagtcgctttgtgggggtcaaacaaaattattcccacttaggttagtcctttctttatttgatccatttgcctgtggatttcagaatctcatatattaaaatgatatttttgcatattctcagagagagaatactcttcttggtagcattaagaagaggccccgctagtagccagcagtcttggagaagaatgagtcacttaataactttattattaagctgagatgttccacagagcggattaggcagtaggttggctaattatctgatatttccttgtttgtttgtttcttttgagacagagtctcactctgtcacccaggctggagtacagtggtgcgatcttggctcactgcaacctccgccttgtgggttcaagtgattctcctgcctcagcctcccaagtagctgggattacagacgtgcgccaccacacctggctgattttcatatttttagtagagatggggtttccccatgttggtgaggctggtcttgaactcgtgacctcaggtgatctgcccgccttggcctcccaaagtgctgggattataggcgtaagccaccgtgcccagccaattatctgatatttcaagtcactggattcttacaagtttttgttctcatttatgtaggttgtatttatataggcgcaagccatggaattacccagcagaagatgcttcttgctttgttaagctatgtactgtttatgtgatattacttagaaacgtctgcttgtcataacaaaatctagcatttcattctgtttccacagtcatcttaacatgtaattacagtacattgaatgttctttttccttagaacaattaaatattaatttataacaataaaaacaaaatacacattttgtctttacttcctaaaatttccacaacaaacatgaattactgttattgatattaaaaatgaaaaagaaatataccaccaaagaatttctatggtaaatgttttttattttttatatttagctgttcttgtttagtagtagtattcaaagaatacagattacttcccagtgacttttctagcttaatgagggaccctgggaatatcagttctagatgaagacaatacgcacaacaaacaagatacatgtgaattttccctagaatatacatacaaatctaaaatccagaaagtctggaaggcaaagaatagcacagaagaacgtttgtaaaggaagtcattgattccctgcagtatgaggcgcctaagatatatcaggttgtaataatacatcatggggtcagtcttcaagtgaatttgatttctctgtaggtgacataatgctctgaacataattcttaatgttcttcaattttttttaaataaaatttttatttggaataattttaggtgtacagaaaagttgcaaagatagatccagattgttcctatacactctttatccagttttcccagatacttccatcttccataactatgccacatttgtgattatcaagaacttagttatattactatcaactaagctacaaacttcatttgaatttcaccagtttttccactaatgtactttatccattccagagtacaatctgggtaccaaattacatttagaactccaacttttgaggaaaattaggacccgagttagacctatgaagatctcagacccaacagataacaactgagatctgcaatcaggaagaataaacagaaatagcacagacaaaagccttagaaaaatccattcaaagatgtagctatacttatgttttactttaagtaatatacacacacacacacatacatagatatgtatgtgtgtgtgtgtgtttctgatgccactgtcagggtatctcaaattttcctttattattatggtccaagaaggatatttttttaaaccaaatgttactgaaaaatctgttgactatgatacactcttggacacgagtgaacaacagtatttctgagagatttagcagcagcatcttaataaaagtatgtatataacctgggatatagttatcttcatacatagtggtaccttatgcatctcatctcattccaggttctccctttaccctcgaatttcgccacactagttatggcagtgtctctttaattcattcattgatcccaaatatacattgagaaacagttgtgtgttaagtaatgggccaagctatatggatccagtggtcttttggatgaactcagataaggtaaataggttttactatatagtggataggtgctaatacaggcattcataaagtgctatggaaagaggcttagacaacatgcatgaggcagaggaaactcatgcaaaagacatggagacatgtggtaccatggtcttttaagttccattccacctgcagcacattccctgcctgggaggcatggcaggaactggagctggatgttgaatcagggcttagaatgacaaaggcctttgatgccagccaaggggtctgaattcattgtgaaaaggatgggaaatcagtgataatatttgtgatttggaaagatcagtataggctgggcgcagtggctcatgcttgtaatcccagcactttggaaggccgaggcgagcggatcacctgaggtcaggagttcaagactatcctggtcaacatggtgaaaccccgtctctactaaaaatacaacaaattagctgggcatggtagtgggcacctgtaatcccagctacttgggaggctaaggcagttgaattgcttgaaccggggaggtggaggttgcagtgagccgagatggtgccactgcactccagcctgggcaacaggagtgaaactctgtctcaaaaaaaaaaaagatccgtatagataatggattgctagagttaaaaatgtgaggcagggttactagtgggagcttctggggtagcacggttcaggtaagaagacacaaaaacccccttcctcttctgtactggaccagcaccaagattatccttttaagagcaggttgaaatgccatttgctctgagaagctttttttttttttaactcctcagacatacctagtcatttactcccatagctcttggttcataactcgattataatatttatcacagagtgttgtaaggactgtgtttcatgtctgtctccctaccacagtgagcttctctaggtcagggcttgtgtcttattcatcttggcatcttcagcattcaggacactgcctgcctggtacagggcgtctgctcaaatatttgatgagtgagaaatggaatgaatatttgccaatcatggatagaatctatgagaaagttaacctctcccctgaaaccttaacaatcactattattcaaattaatttttgcaaaattccatgcacaataatttagttagttcagttgaggaaacaaggatgagattcaattaaagaaggaattttaaatctttaaataattgatacagattagaattccttggtcatgttgtagataatccaagtttgtgggttaaaaaagagaaatatctatgattgcaaacttggtgtagaatatactataaaaacaatgttgtgagatttacttcaagtaaatgcacagaagtatatgaacgaacatttctttagttctgagggtttatcaatgggactaagcagaacctgtgttgctgctgggtgctaaataatattgtgggaaaagaacttgggatattttatttggatccctgttgcctggtttgtaattactcacttgaaccagaggtcagaaaagcaaatgcctaaaagggccagacaagtggcagaaatgaataaaagtttaagaaactaagatgtaagaaacatcttacatcttagttttaggtgtttagatgtttcttacgtcttagttttaggcattctgccactggtcaagtttctggtataagaaactaagatgttggaacaaacgatgcttgtgaactggatgctgcctgacccatctctaagtggcagcccttactctgattcaacagatggctgatatgcagaaacttgggatcagtttgccatagctcctaattttttatgagaaaccaaacatctcaatttaagtcgaaactatatgtctttattgacagtaagtaaaaataattgatattgtataggtaaatcctcttccagcaatgatggcctaggttattttggatcaaccttcccagtaacagctagagaagccaaactaaatattaaaaaatattaaaatctgaaatttttgcagagccaacaaaacagtgaagaattatggagtcaagagcagggagaagatgaaagtccatggaggtaaacctggtatttgggttcacttttctcttaaagatgattgttgattttgaaagctgtggcttaaaggttgaaaacagagagctggacagactcatagagctgggggaccaaaaatgggaggtcagtgtttgttaaagagtagggatcatggtaaatatctcaggcaggcaatttggatccagaggagttatacctaaggataatactgaactggaactatatcaaatctaacaggaactgaaactcaacctcagatgatctccaattgctgattggattaaagtgttttgaggttactagtgcatctaacctagctgcttgccaaagcatgtgtacattttctctagaggaacaaagcattatacagagtcttgtgacaatttccacatgcgacatctggcaatagaaaacaaccagccaggctggacatggtgtttcccacctgcaatcccagcactttgggagccaaggcgggcagatcgcctgaggtcaggagtttgagaccagcctggccaacatggtgaaaccccatctctactaaaaatacaaaaattagccaggcatggtagtgcatgcgtgtaatcccagctactcaggaggctgaggcaggagaatcacttgaacccgggaggcggaggttgcagtgagccagagatcacgccactgcactccagcttgggtgacagagcgagactccatctcaaaaaagaaaagaaaagaaaacaaccaggcaaacaaggagacaggatgtgaccaaaaaacaaaagaaaaacaggcaccagaaacagacctacagtgggatccagataacggtgttttcagacacagactgtaaaatggccaccactgatattttaagaaattaagagtcaagatgcaaactttccacagagaattggaagcaataataattaaccaaaagaaatgttcagaattaaaacactatgtgggtcacaaataacatatacagaaaatcagagttttgagcattgctttcaacattctgcatgcggatgtagcataatgggaccagtgcaataaattgcagattgatttggtttgtatcatagtatagcataaagaatttggcataaataagaaaatctttttttatggatcgcaaaagatagcaaagattagagatacaaaaaaagttgaaataattgatgaggttcaattagtttcaacaatgaattgggtttttggtagctcttattactatgaattaaccaatcaaaatttttaatccaaaatcattccggaaaagttttgacagggaaattctgagaggtagtatagaaggttccatggtttatggaatcaaatagatctacatttgacccctgggtttgcttcctactaggtaggtgaccttggatcagttactaaacaatctgaccctccagcatcctcatttctaaaatatatgcataataattttttgttgaagttgttaagaaagttagaaaaggcacctaaacaaacagccggcgcggtggctcacacctgtaatcccagcactttgggaggctgaggcgggtggatcaccaggtcaggagatcgagaccatcctggctaacatggtgaaaccccgtctctactaaaaatacaaaaaattagctgggcgtggtagcgggcacctgtaatcccagctactcggaaggctgagacagtagaatggtgtgaacctggcaggcggagcttgcagtgagccaagatggtgacactgcactctagcctgggtgacagagcaagactccatctcaaaaaaaaaaaaaggcacataaacttacaagtgtagtaggccttaaagcaggttagatagtcaactcatagaattattggcaggaagagagggtatctactcagttttctttcctctctataccacccagaactcttactaccctgttgctttcaatcatatgcatttctttgtcctctctccttttcttcattcctttcatttattttattttgagagagaaacaccacatctgtctcatgtaattaccatcatctggacatgagtactttttaaaacatcattgatttattctgagaataccaaaaaatgacctttttatctttctcaatatgtcaagaataaactatcagtttgggttgcctgttcaagctaaaaatctatttggtttttacttccttgccaaggagagagggttacagctttatatttgtgtggctgatagtcgcccttgtgataagcaagacagtttagcagagtcctgagtcatcagcaagacccccaactgattgagtcaatgtggagaatctggacagaggaaagctttcaaattcatgatctgaacctttattttttggccatctttcctttctgcaacatcttcttcttttaagtataaagtttctactgtaccttaccatactgaaagacaaatatcatgaaatagacaaactttaaaaatacaatgtctatataacaaattattttgaagtaaccatggataaaatactatttaataattatcatttgtcaagggacttttactagactaaaaaacatcagagaacaatttcgtatcaaaaatatatgaacactttcaattttcagtctatgtacttaaaatattagtacttaggagaattttaatatgtttgcttccttttatatgaaaaagaaactgaacctttattctttacttaaaactattagatattatgtacccaatctctatttgtgtattttcttccctgattttaatatcttatttttataaggatggttttcctccaggttaacatcagaacatcagaaaaaatagcagtattcttttttcttttttattttttttgagatggagtctcactctgttgcccaggctggagtgtagtggcacgatctcggctcactgtgacctccgcctcctgggttttcaagcgattctcctgcctcagcctcctgagtagctgggattacaggaacgtgtcaccactcccagctaatttttgcatttttagtagagacggggtttcactgtgttagcccagaatggtctcgatctcctgcgctcatgatccgcctacctcagcctcccaaagtgctgggattacaggcgtgagccaccacgtctggcaaaatagtagtattcttaaagaatggagtcttgtgtcactttctgcactaagagcacagttttttccaaatgtcagggtgaactctgttgaactggatatccctacaaaattttcaatcaacttaagtacacaaaatatattttgcagttttatttatcatcagaagaaaaacattatctttattgcctcttgcgtcttccttactggaaataaattttaattcagtaactatgcattgaccactatttaaaaccagatactgtgcactggccatggagaatgtcagcatgaatcaatccctatacccaaggaattcatgagttcaggtcccctgggtgcttccagtgtcctgagggttttggaggacacatcctcacaggttagtctgtgttttcctccttctccttctttttaaataaactttattttttagaactattttagatttacaaagacattggaaagacagatacattggatatactccacacccagtttctcatattattaacatcttaccttagtatggtatatataattataattaacaaaccaatactgatacattattaactaaagtctctactttattcagatttctgtagttttcccccaatgttctttttcttttgcaagatcccatttagagtaccacattgcctttagccatcatgtcaccttaagattcctcttggctgtgacagtttctcagactctccttgtgtttgattattttgataattttcaggaatcacttatttttgctgggataaaaaagaagttgatcacaggctgcgaatcaccttccatgattatttgtctacatgaggcagaattgccgcttaactgcatagtcctctggggaaggctgtgaagagtttcttcagtatgactccaacagtggccctcatcgtggctcttctccaagcccactcacctggcacctccaggcagctgctatattttcagaccactttcctgtctctgagttgtgatgtttggcatctccaaatcttttccagtccacctcagtctcttcagcttccaaatatttctctataccaaaagccctaattgcttcttttaactagcatttcagtccacatttttatcaaggagaaatcttggacctccttacgcaagggcagagagctcagtcttcaaaaaccacaatcgtgggcttcaggtctcttcttcctggagagaaagggagttgttgtttgcattccatccctcttctagaactcctaacaattcctaatgcagcaaagaaaagacaaaacaactgagttgacatttcaaaatagattgaatattcatattctgctagacataatcacaagaggagagttagtattattattgaggtgtgtaaaagatgctagaggagcatagaggagggaaaagtaaatctattgctctggaaagaaagaagggaaagaaaaaggggatcagcaaagagtataaggctttcttataggtaatacctgaactgagtcttcaacagtgtgtggtgggcagtgccagcatcccaggtagaagtaacagcctgagtaaagacaggagggcatgaaataacatcatatatttgagaaagtgccagcaactctgaagtagtgcagagtaaagggactatgagggaatggcaggaggagagattggaaagttaagcagaaacgaatcaggctgggaaatgcctttgatgtcactctacggtctaagaatgctgttgaacgctgtgaagttaggtcaccttgctggctgagcagtggggtttaatatctagattgtaaaggggtaggataagaaggtaagaagttagtgcactcagcgaagagatctatcatcccagattgggccatgtaagtagactgataaaagaacctatttaaattttgagttaaaacaaattaaaatgttctgagtttgctgagttggtgagttgactaacaatcggcaatgcaagatttaagactagtttatatgagaccttaaaactctggctgcttggaccaagacactctttggtcaaagagaagtccaggaggctatttgccctctagtggcaaccacaaagcattttctatttgctagaaactgactagaatattcagcgcagaaaaaatgttcccaggaagccagtggccactatacttcatgaagctgttttaattagtatctagacttgaatatctagcttaatacacaagcccaatataagttagttaagatagaaaaaaatgctgtttaataataaccaatcaatcatacataccaatctctcattggaattacttaacacaacttttcaataccatctttaacaggatatgatgggaatgtagcattttattataaataacatctcagatttttaaatgtagtgatttattttaaatgtataacatagaaagatatttgcaggatcagagatcagttttcctacatctccaagaatctattttaggttctctgttctgttcacttagattttacacttgccatctagaaaattttggtccccaatttagcattatagaatttccagttcacttctttcatgttattttctttttttccacagacgtggtttatatgttattgaagagcctttggtatcacctttcaatctttcaaatgtacagtctttcgagaagtaatgctttcccctgcctttgctaaaggcatttcacagaagcatctcattatttatttataagtgtaagtctccagaataaggtaacattaccactggtctaccattgcctctatacacatgaatacattcataattaatagaatggtctatactagtgttgcagctagaacaaacctaaggtcagagctctgggagagcaagtcatgtcattatttttgttaagaaataaagagcgtaagttaaaaattatctgaagggaggtgtgcgtgtaggctagggagacaaagacaacggcgtatgggaaagaggactgaaaacaattcgcggaaaaaaactataagattttgaaccaggtcttgccaaaaaaaaaaaaaaagtgtttttgttttctttctgagttgtctctctcgttggagcaggttaatgattgaccactgcattccccttttcttgcgggctgttaggccctcaaagaaacggaaagtagttgagaaacaatgggattaaactgccttaggaaattctgaacggatgaacatcaaacaggcaggtgaggtttctcatggaatgcttctgcccaggtttcctgcttctggaggggaaattgatctcattaaagagttctcttccatacaatggataatgatgagggtgaggggttattgacataaaaagatgttattcactctacacggctaagagggggaaaaagcaagcaacaaaacatatgcataatataatgccatttctgtaaaaattacatagtatatggatatttatttacatatagaaaatcaactagatttgctctaaatgttaaatagagattgtctcaggttgatgggattatgggcagttttagtccttcccctgcccctatgtttttagtgattcatatgtgtaaaaataattgctttggccaggcacggtggctcacgcctgtaatcccagcactttgggaggccgaagcgggtggatcacaaggtcaggagttcaagaccagcctggccaagatggcgaaacccccatctctactaaaagtacaaaaaaattagccaggcatggtggcaggtgcccgtaatcccagatacttgggaggctgaggcagagtatcacttgaactcgggaggcagaggttgcagtgagctgcgatcgcgccactgcactccagcctgggcgatagagcaagactccattgcaaaaaaaaataataataataataataaaagaattgctttaaaaagtataaaaatattttcttgaaacagaaaaagttagttacattgtagttagctaaccatttgtatacagtaattaatttgttttaaaaattacttaaagtcctacaggaactagaaaaatcaaagtgaatgctaagctgattttagagtgtatagactttcctgtgtgttaagtgagcaaacaaaaacacataaaagattagtttattttatcacataatttgtacagctttctaaaggtttttaagaggaaataatgtttaaataagtattaaagacacataccaaactcagataaaatatttacaatacatcggaccaattaaaaatgcttagcacagtgcctggaacaaggcgagggtttaataaacagatcattattatgattagtgtattaatgtattacaaaccagtaataaaaataaaaattcttcaagattggacaaaagagatggacaaacctctaatcacgcaatggctaataaacatatgataaagttcaaattatacattattcatagaaatgcatgctaaggtaataaatagatatgcaattctttacccatgaagtaaacaaagacatatttttaaaaaggtattttccaataccggcaaggtttcagagaaatgggtacttttataccatgcaagtgagaaaatgaatcagtacgaactctctagatggcaatttctcagtgaatatcaaaaacctttaaagtatttatattagtcaacccaggaacttcatgcctaggaatttatcttaaggaaacaatcaagaatgttaacatacaccctttaaaagacccaatagtttggcttgcagaaatttatcctacaggtaatacttctagtgcacatggacaaaatgacacagatgttgcacaaggttgtttatgtaatttcgtaacaaaagattggaaacaacctaaattaccatcaatagcagtaagagaaatacactgtggtactttgagacaatagaatattatggaagaataacaaaatgaaaacagaatgtgcacatatagaaagatatcctcccgatatttttaaattttaaaaagatacagaacagcgtaaaaatgggagaaaatgagaatatgtttatatctgctagtatattcaaaaaaataactctcaaaggataggtaagaaattaatagtggcttctgtaaggtgtgagagggaattaggcagacataggacaagaatgaaagggaaaatattttctttggtttttgaaccacatacattcattagttttcttttttaaaaagtaaataaatgaatttttaaaaatactcacaaaatgcatgtcaagatagtatgggaaagccaagtatcttttaaacgtccaagctgaataaatacaacacccgaaattcactatgctcatcttttcctctttgaagacagagaaaatgcttttcttctcttggcatcctcctatctgaaaaagtacctggcacataggaggtactcaattaattttagaggaataaatgaatcaatgaagttttaaaagttaagttagtcaccaaggaaaagactatacactcttctcaccttcagatttttttccagcaagtaacgattatttttttagagaagacgcaaaataaaagttccaatggtccaagtcgctattttaagtgctcattcatcagttctaaacctaaagaggctgttaaagtagattattaaagcaaagctaaaatcaagtaaaataactgcactgccacactatggtaccatataggttcataaaccaggtttatcatttccatccagtcacgtgccaaatcactgttccttctctcgccaatgagagatatcagggtatgttcacaactaaaccatgacagttaatgagggatggaagacattgagcttagagaatgtgctataaaccatcaaaatccaccaccaaacacacccagtattaaaaatgatctagtgctagtataacagttaacactgggggtaatgttcaggggcagaaatgaagcctacaaaatgagctggtgactgtatattagattagtgattctcaacactgactgcccattataatcacctagggaggctttaaaaatactgattctagggctccactcccagagattctgattaaatttctgtggggtggagctcaggaattcccactgaaaaaaaatagtaatgccgatgtgaggtcagggttgaaaaatgcttcattggaccatgggagggatggagggaagttttttccttttcttacataaatggatgatttaatcagctggtggcagccattacaattcatgcaaacacaaaatttttctgattcacctcttcacctgatattttctcatcttccctagaccaaaccttccccaaaactccatgcttggactattaatattatttcctatgggtctcttcgcttgttttcgttcttccctcatattttcaccttgcacaacaatgacaagtggcttttcttatatcaaagactctatgtgtaaggtatttgtcatctaaatttctcaggttcggcttccattctgagctctgccattatctaatgagattgtactgctgctcagtttcaactacaccaaattaaattgggtaacctctaaggttgtcttaccccaccagtaaatcttcaatcccattttttatagtttccctaaatatttttaattgaagtcagacaaaatcttcttcacccctcaacttattttttgctcctttccttccaatgcaattgttatttatgctgtttcttctgctttttcattccctcagccaatcatatgcacaatcacgtggctcaagctcatcttctccacaggttttaggaacccagaccactttatatccattatattcttactttatgctttccttggtactctgtggtcaagattctctttattcaaagtgcagttcagggttagcaatatcaacatcacttgggggcttgttaaagatgcagaatcccaagcctcttctgcatttcatccaattgccaggtgacttcatgcacatcaagataaactggcctatacccgtttattagcacttgctttgttttctagtttctctctttctttcttccttccttccttttctttttctctctctctcccctttttttttttgagatggagtcttgctctgttgcccaggtgggagtgcaagtggcaccatctcggctcactgcaacctctgccaccttcaagtgattcccctgcctcagccttctgagtagctgggactacaggcgtgcatcaccacacccagctaatttgttttttttttttttagtagagatggggtttcaccattgagaggtgacagcgtgctggcagtcctcacagcccttgctcgctctcgtcgcctcctctgcctgggctcccactttggcgacacttgaggagcccttcagcccactgctgcactgtgggagcccctttctgggctggacaaggccggagacggctccctcagctggcagggaggtgtggagggagaggcgtgggcgggaactggggctgcaggtggtgcttgcgagccagcgcgagttccaggtgggcgtgggcttggcaggccccgcactcagagcagcccaccagcggtgccggccccgggcagtgaggggcttagcacctgggccagcagctgctgtgctcaatttctcggtgggccttagctgccttcccacggggcagggcttgggacctgcagcccgccatgcctgagcctcccccgacgtccgtgggctcctgtgcggcctgaccctccctgatgagcactgccccctgctccatggtgcccagtcccatccaccacccaacggctgaggagtgtgggcccactgcgcaggactggtaggcagctccacctgcggccccagtgcgggatccactgggtgaagccacctgggctcctgaatctgatggggacttggagaatctttatgtctagctaagggattgtaaatacaccaatcagcactctgtatctagctcgaggtttgtaaacacaccaatcagcaccctgtgtctagctcagggtttgtgagtgcatcaatggacactctgtatctagctactctggtggggacttggagaacctttgtgtggacactctgtatctagcatcatctagtgggaatgtggagaacctttgtgtctagctcaggggttgtaaatgcaccaatcagcgcaaacagaccactcagctctctgtaaaatggactaattagcaggatgtgggtggggccaggtaagagaataaaagcaggctgccccagccagcagtaaaaagccgttcgtgtccgcttaggtgctgtggaagctttattctttcgccctttgcaataagtcttgctgctgcttactctgtgggtccccactgcctttatgagctgtgtgctactcaccgtgaaggtctacagcttcactcttgaagccagcgagaccacaaacccaccagaaggaatgaacaactccagacaggccgccttatgagctgtaacactcacggggaaggtctgtagcttcactcttgagccagcgagaccatgaacccaccagaaggaagaaactgaacacatcagaaggaacaaactccagacacgccgcctttaagaactgtaacactcaccgcgagggtctgcggcttcattcttgaggtaagtgagaccaagaacccaccaattccggacaccatgttggtcaggctggtctcgaactctccctcggccccacagagtgctgggattcaggcatgagccgccaggcccttaacttttattccaaaaaaatttcagttaaaacttccagtacatagtatttgcatagcagggaccctgaagtgtttgttaaatgaatgtcacatatatcacatactgtgataggaataaagtcattcgtttgaaaggttgataaatacaatgatagactgctagaacttcatgagtcttaagagaatatctcaccagatctcatcttccagatttaaaaaggggggcacagacttcagcaggaagggctgatttaacgacatctactataatgtgagtctgggccacactctggttttccagtttcagtaatgatgcatcactactcttgaaaaaccaccagaaaccaacaagtaagcacccaaaaagatgtttaggaattcagaagtactccttttactctagccttaaaattatttgctcttgcattgtggattacccatcaacaatgtccagtccttaccaggagtcagggagagcgtcaaatgctgggcatactgaaatgaccttaacccagtacttggccacctacaggacactgtaatggagagcaaagcaggacagaggtaatgcaaaacacaaaaacaccaaaaaattggaaatctttggagccatttgccttctagaaccttaaaggcgccctatagtcccacactatagaatattggaagagcagtcggctgtaagtctgaatcatgagttccttacacttttttctacccagttcaattttgggaacttccgagtcctggtcctttcattgtttgtgatacccaacacccagcacaatgcggagagcacagtaaggtggcagtgaattcatcaatactttcaaagtctattttatctacaaggacaagttttattgtatgtttccttttaaataagtgccacagtcgcagtaagtgaaaacatcctgacaccaccccagcggcccccccagctcgtgggcctccccgcagagcgcgcgcccgtgggggtaaccggcggaaaactagggacgcgggcacagccgcagactgggcgtggggggcaccggaatggccgagcctgggacgctgggacctctggccgccgcggggcgaccaggcgggcggagacgtctcgcgccctcccgggccgcgcggctccaggcgcattcctgcacccagctcccgcgcgccgcgctgcgctgcctcccccggacagctgattcattggctcggccgcccagactgcctggcgccggctgcgtgacgtcacccattcacggagcccgcctcccccgctccgctggcgccggccgggcggtcgccctgacaacgcagacgccagcccgcacaatgacttccagctggagcagcccagccagcctgcgcgctcactcgcttgcttgcgctgggcttcagggcgcccgggtgagtttttttctctccctctcgtttttttttttttcccaggctctcgcgggtttcccctgccagggaatccactcgctgtagttttctagggctctggtcccagtcctttctgaagcgcgcttgcaggctgtcttcctcagtcgccctctccctgggtgctgttttgctgggcagcatcccatgctaggctcggcagacattctggcggttgggttcggcccttacagcgctaacacctgcagagtcgaggctcctgccaaaaggcagaaagcaaaggaggaaaaaattcattgtcataatagcgaaaatgataaacctcagctgtttaagagaagaatgtctgagtagctgttgattatctcccataatcacaaaacaacttttttttaaaaagaatttgcactgtctgttaaaacgcggtcattgttttgctttcaaatcgaacttcacgacagttagcaacttcaagaacgcttccaaatggataaatctttccagaaggtaaaacaaatctgggaagttgtagcagtgtaaattggagagtgtgtgagggtcgtatttggagagagagagacacacacacaggagattggtggtcttggggcaaggcaaatagctcattcgcccccccacacctccagtttccaccccagacctttaaatcttgaaggtggaggaaagggagacgtagctgttgattagagttgggtgggaggtaattcttattctaaattttcattttatttattttttggtgccagatttcttgcttcaaaacagctgcatttttggaagaaagtccacaactgacaactaagcaaaaccctcctggtggatagcataaatctgctttgttgaagctgctcatttgtctgatctatgagtccagaagatgcaaactcccttcccagcttatgcaaaaatacttccagtaaaaacaagccctttggcccttttcttttgtcagtccagatttcagcatgttcttcgctttgttattcatcattttatgtatttggacccatcctcaaacagactttaaaccgtttaaaggcaaggagggactctttcgtaaacctttaatcccctggcccagctgagtagatgcacagtgtcttttgatgatggtgatatggaatgattaataaccacacaaggcattcggttggtcaagtcactgtttattggctcaaaataatccttggtttctgtatgtctacagctcacttcctaaacagttaaatccggagaagtctaatagataatagttggtgatcataaatataaataaccaatacattagaatgtgtagtcaaaataggaatacttgcttttcacttacttcccacgggtcgctgctggtggtagtcaacacaaataaaaatttgaactcattttgttattcatctaaaatgagaaactcggtgaaacattgattttctaaaattgctgcatatttaaatgtgattataattgctttttagcattttaaaattgtaacatcgataccaaatgcttaagaatctaaagaatagtctattggggctggcctattttgtgtaaaatggtctgtatcataatggatgactgattatcccatccacattatttggattcacttaatactaggttttaacgttaggagaataaaaccctcaagaaacctaacatagatttgtatatttagttttctccttccttatcatcttccaccagacttacaggtgttccacctgcttgtagtttcggtaataataccagctggcggtggttcctaactctagctacactttaaaattacctcgtgcatttaaaaaaaaaatgcagttgtttaggttcttcccctagatattttaatttacaaggtttgggatgtggcctgggcaccgatttttttaactttttatttgaatgtagacttacaggaagttgcaaagatagtacagagaggtctgatagagcctccactgttggttacatcccgcatagctagagcacaataataaagccaggacattgacactgagataaaatgtgcctgtgattctgtgtcaccttatccctgaagactcttgtaatcattaccacaatcaaaatacaaactatttcaacaccacgaagatctctctcatacagtccctttatggtcgtccctttctttcccccacaccatccctaaccctttgcaaccatcagtctgttctccatttctataattttgtcgtttggggaatgttttataaattggtcctcacagcttgtgaccttctaagattagctcaccatcccccccacccccccaccccacccaactcagcagaatgccctagagatttatccaagttattgcaggtatttctagtttgttcctttctgttactgagttctacactatgggtgtaacacagtttgtttaatcattcagcattcacctatcatacattttggttccttctttttttgggcggggggagtgcctattacaaataaaactgtcttgaaaaattgcttgcaggtttttctgtggacctaaattttcatttctctgggataaatgtccaggagtgtgattgctgggtcatatggtaagtatgtgtttaatttttaaagaaactgctgaactattttccagaaatgtggtactattttacattcccagcagccatatatgagagatccagtttttccacatccttaccagtattttgtattgtcactatttttttacttttactgttccgattaggtgtgcagtgatacctcactctggtcttaatttgcattttcctaatgactagggatgttgatcattttctcatgtctttgccatacacatatcctcttcagtgaaatccctcttcgtgtcattttcttattttcttgatttgttctgttactgttgagttttgaaggttctttaaattatagacatgagtcctttatcagttacatcagcagtcctcaacctttttggcttcagggacaagtttcgtggaagacagttttttccacggaagtgggggtggtgggggaaatggtttccagatggaactgttccacttaagatcatcagacattagattctcataaggagcatgcaaactagatccctcgcattcgcagttcacaatagggttcgctctcctgtgagaatctgatgccctggctgatctgacaggagacagagctcaggtggtgaggctggctcaggaggtgcttaactcctgctgtgttgccagcttcctaacaggccattgacctgtaccagtctgaggcccaggacttggggacccctgagagatgtggtttgcaaatagtttttcccagtgtttttgctgtcttttggatcttttgggccacatccggtggctcacgcctgtaatcccagcactttgggagacttaggcgggtgaatcacctgagtcgggagttcgagaccaggctgaccagcatggagaaactccgtctctactaaaaatacaaaaattagccgggcctgatggcgcatgcctgtaatcccagctactcgggaggctgaggcaggagagttgcttgaatctgggaggcggaggttgcagtgagccaagatcgcgcagttgtactccagcctggacaacaagagcaaaactccatctccccaaaaaaaaaaaaaaaaaaaaaaaaaaaaggatcttttggagagaaaaagtttttaattttaataaaatccaagtttttaattttttttctttaacttttaggtttggagtacatgtgctagtttgttatataagaaataatgcatcatggggagttggcatatagattatttcatcactaggtaataagcacagtacctgatgggtagtttttcaatccaccccctcctcccactctatactcaagtaggacccagtgtataaaagtatagttgacttttgtatgttgatccttctgtgactttgctgaacttattggctctaggagttttgttgttttggggttttttgtttttgaaggtttcttggatttttttttttttttttttttttttttacaacgtagggaaacctgtcatctgcaaatagcaacagttttagttcttccttgcatttccttttcttgccttattgtgctggctagaacttccaatattgtgttgtggtgaggtgggacatccttgttttgttcctgagcttagggagaaagcattcagtcttttttttttttttttttttttttttttgagatcaagtctttctctctcacccaggctggaatgcagtgtgtgatctcagctcactgcaacctctgtctcccggattcaagtgattctcccacctcagcctcccaagtagctgaactacaggtgtgtgccaccacgcctagctaatttttgtattgttagtagagatggggttttgccatgttggccagggtggtctggaactcctgacctcaggtgatctgcccatctcggcctcccaaagtgctgggattacagccaccatgccaggccagcattcagtctttcgtattaagtataatattagttgtagggtttttttttcttcaagtttttaaaaagtcagtttgaggaagttccctgcattcccagttttctgagaatttgtattatgaatggatgttgaattttgttaagtactttttctgcatcaactgatgaatcatgatttgtttccctttagcttgtgaatatggtagattattaatatattgattgatttttgaatgttaaatcagtctttcatccctaggatgctagctcatggtatataattctgtgttgatatagtgctgaaggccatttgctaatattttgttgattgttgcacttatattaacgaaggatatcagtctgtagtttctgtctctgtctctgtttatctctgtctccctgtctctctctctctcatgcaatctttggttggtttggatagcaggataatattggcttcctaaaataaattgggaagtgttcatgcctcttctatttttggggaaagtatatgtataattggtgttaattcttctttaaacatttgttagaatagtgtggtaaaacaatctggcgggccctggagttttctttttctgtaatttaaaaattatgaattcagttttctcaataaagtgctatttaaatgatctatttcatattgtgtgagttgggataatgtgtgctttttgaggaatggggtcattttatctattgtctaattttgtctaatttatgtggtatttactcattatccctttgatatctgcaggatctgtagtaatatccctgctttctttcctaatattatgtttttttctcctttttaatttgtcagtcttgattgggatttgtgcattttattgattttttttttttttccaaagaaccatcttttactgattttctgtttccaatttcactgagttttgcttttctctttattattccctctctctgctttctttgggtttttcttttccttttctatgctcttgaggtataatcttagattttaatttgagattttttttgctttttaatgtaagcttttagttctataagtttccctcttagcagtgtttttgctgcatccacaaattttgatatgttgtgtttttattttcattcagttcagtgtatgttttgatttccacttagacttcctctttgagctatggattattttatagggaatttagtttccaagtgttgggttattttcctattatctttctgttactgatttcgactttaatttcattatggtcagaggatacactccatatgatttaattcttttaaatttcatgagtttgtgttatggatatgatctatcttggtgtatgctctgtgattgcttaaagagaatgctgctagtgttgggcggggtgctctggaagtgtcagttagcttctgttgcttgacgatgttattgggttctcttatatctttgctgattttctatccaattgttttatcagttgttgagagaggagtgttgaagtccccaactataattgtggatatatctaattctcccttcagttctatcagtttttgcttcacatattttataagtctgttatttggtgcatactcacttagaattgctaatacagttcacttagaattgcttatgtaattctttttggtgaattatatttctctctgtctcttgtcctttgctttgaagtctattttcttttaatatagccatccctgctttcttcaaatactttcatgacttttttttatacttttactttcaacctatttcattatatttgaagtgagcttcttgtagatagcatatagttgggtcatctctttttttaaaattcattctgtgatctcattttattaatagttatatttagatcatttacattaaatgtaattattgatatacgtttatgcttttgtttcctattttatttaatatttgctctgtcttcctttttttaaactctttcttgctttgggctacttaaacattttttaaaaatccgttttgatttatgtatagtgtttttgagtgcaaatatatagcatttttaatagttgctgtagctactgtattatagttatagcttactaactctattggtgttaatggagtaccagttcaagtgaagtgttaaagtcttccctcccttcatatcccttcactttataatataaatatgcaatataattgtcttaagtatctcctgtacatacatttagaaccctaccagatagtgttataatctttgtctcagtagtcaaatacttagaaagctcaagaggagaaagaaaacctattatattttcccatggttttttttatgatttctgtcttctttctttcttcttgatgttacaagttttctgtttttaattatcattttctttctgtttagagaactcttttcgctttttttttttttttttttgacaagatctttctctctcagccaggctggagttcagtcctgcaatcatagctcactacagcttcacactcttgcactcaagcaatcctctcttcaccctccaacgtagcaccaccaccctagccagctttttaaattttttgtacagatggggtcttgctttgttgcccaggctggtcttgaacttctggcttcaagcgatctttccacctcagcctccagaagtactgggattacaggtgtgttccaccatgcccatcgtctttagttattcttttaaataggtctgttggtgacaaactatcttagttgtccttcaactgaaaatgtcttgatttttccttcattattgaaggatatttttgctggatatagaattttgagatgacaattcttttagtacttgaaaaatgttatgccacttccttatggcccccatgtttcttgttgagaaatctgtcatttaaatttttttcccctataaataaggtattatttgctgttgccactttcaagactttttccgtctttattttcagaagtttgactataatgtgcttcagtagtgatttctttgcgtttatccttcttggcattcattgatagttttatgaatctgttagtttatgctttggctaaatttggggagttttcagttgttattttttcaaatacttttcagccacaccctttttcttctctccttcctagtctttaaagttatattagatgttttgttataatcctactggtcccaaaggccctgctcattttttaaaatatcagttttctctctgctttcagattgggtaatttttattgttgtcttcaagtttactgattcctttttttgttcccttcattctgctgtttaggtcatccattgagtttttaattctgctgtctttccactaacacaatttccttttggttcttatttatatctttgttttccttgctgagacttttaattttttttccatttgttttgggcatgttcataattactcattaaaacatttttatggtggtgctgctttattgctgccaagcggaaatagaaatccatgccaatgttaataactgggtgtgagggactcctcgtaactcctgggcaagggtggaagttctagttctccattaaacctctgttgatatcatcctggctgggaggggcatgaagactcattactgcttggcctctactgacattgttgagttgagttggggtggtctggtttctgctgggcaggagtgaaagttctacctctccactaacttcttctgatgccactccagtgaggtggggaggagcattttattactgcaggatgggatggaagtccatactctccatgtggtctccatgagcaccatcagtgtggtggtggtggtgaagactccttattgcctggtggagatgaagttcctagctctctgcttttcctctatgacaccacttggataggagttttggggtatctggcaaaggtggaaatggagcctcccactcagtttttgctggtgggggtggaggtgaggccacagttttctctgtggtgtttggctgttactgtccaagcatcttctgtctggctaggtagccattttgcttatcctttttctagagagggcaggtttctgttgaggctttttgggttgatacttgttggtatttctgggtttctgtcttctccagcacctaatctgggatatttgaggcaaaaaattaactcagagcactcaccacctgttgttcatcgggtcccaagttccctagctgatttgccgccctctgttcaccttgtcttcaaccttcttatgtctgaaatagatggaacactgctccatctttctgaaaattgaagacccattgctttcaaaagtagatgattctaaaaagtacagcccgggttaaaaacaacctagctatgcctgtttaacacaaagattatagtctctccccttcattgtgaaggggtatcagtttctacttctgttggatttgaaacagctttaaaataattttagcatatgtggactttctcttgcccaaacagtgaaaatattttgaagagaggagcaatgcattattatttggaaggcagctgagcctggtggtgtggacaaggcttttggaggcagaatatctgtattgcaatgagatcttggtcaaaattcttaactttcttaaggtcaataaaaattcatgatattgttaagagtaaatatgttatatataaaagacccaccacagtgcatgactaacacataatatatgttcaaatattagttctttcttcctgtggtcatgctctatatattacctgaatagtgattaaggaagccaaacaattgggctgagtatttgagtcagaggagttactctggaagcctcttaactctttaggctcaggaatagctagaaaaatagttgtaaggaagatatccttgtaagaatagaaatgtgaatttttaaaaatgatccaggtatgatagggtagtggtgtaagtcaagaagaaagactattgagaatacaaaatgataggtaaaagtgattggttatggtagtagaatagacacggaagtaaaaccatgagcaggaagtgaaagactgggagaaaagtttgaggttaaggttagggcctggaaattttagtaggtaaagttcttcctatttctctgactgtactttctaattttcttttgagggtttttttttcttacgtattccttaaatgttgttgtaatttgaggttctgccctctttttctcatatatactgaccttggataatcttatccaattccataatgctggtcttaagaaaaagctaacagattcgaactcatttattgaatctgcagttaccactggatgtctccatttggatgtcacacaggcttttcaatctcagcatatcctaattcatctcccttctgtgttctccatctcattgaacagtaccaccattgattcagatcctaaagtgagaaacgcaaccatcttcctgtctttcatagaacacactcaagcgacaaccaacttatgctcatttttccttcaggaatttctgaaaaattctattgagcattaagggaagtcatgttggaagaatgctaaaataggtcaaaggagacataaaatattctcctgagtctcaaaactaatattccccaggactgttttctctatgctttatggggtaactgatagaattctgttagcattgttctttgtttcttgaccagttattgccagtatttgaattttcagtttcatcttcattctagaacttcatattctcttatgccatctttttcttttcaccttgttttctcttttcaattttatgacaattgctgctacaagttgaattcctatttctctcccatcacctgctatattaattagggttaggttatgttgcagtgaaatcttagttgctcatagaaacaaagatctatgtcttgctcctgctacatatccatgatgggttggctaaatgttttctccttccaggtttgagtgaggccgatggacctctactgtcttaagagagttggtggctgtggcacaaggaaggggggggggggaagcaagatacatccagaaaggcttctgcctggtggaattgataaacgtcaattgagattttccaaggaccaaaacacatgcattaccatgcccaacttcaagtaggtagggaaacgaagtctgttatgagggtggaacactgaaatagctggtgaacatttatttccagcatgactacaagactcactcatggctcctctgctggaagccctgccttcttctgtcctccctcccttctccttctcttcctttcttctttccttcctttgacattttaaaaatgactgttaaaaatattcttgggaatgccacaaaaatgggaaaccaagcatttagtactacagggtggttctaagtattgaaaaataaaaatggatttgttaatacattgcactgtaactgcatagctagtggttccaagtgcagcctggttgacagcagtgatccaaagtagcagcgacaaaaacaaaacaaaacaaaaaaaactgcaggcaagttagaatttcattaaataccaaaagcgcatctcttagcacttactccatagctctagggtgctgatgctcactgttatcagttgcatgaatcaccatggcaattgatgaatgtaaaaattcagtatatgtttttttcttgcagttttttaaaatttttggttctgaagaataccttttcatttgtctgtctctgtctctcttattctgttcaatgtatgcaacaagaaaacattctctttttttttgtgacttaaaagctttttctaatttatttgaaaaactctgaggctggatgccgtgggtcacacctgtaattccagcactttgggaggccgaggtgggtggaccacctgaggtcgggagttcgagaccagccaacatgatgaaaccccgtctctactaaaaatacaaaaaattagccaggcatgatggcaggtacctgtaatcccagctacttgggagctgaggcaggagaatcatttgaacccgggaggtagaggttgcagtgagctgaggtcacaccattgcactccagccttggcaacaagagcgaaactccatttcaaaaacaaaacaaaaacgaaaaactctgaatactgactcctgacaaaagagaattctattgtccccccaatatataggcatttatgttaaccgaattcttttcatgtctctttattagtgtgctcacattcatgctccttggactgtatctccaaaagcaagatagagcatcacagctgatactcttatttctatgtgatgatagaccatcatatcagatagtttgtttttacactgtaataaggaaaacctgtctggaaggtatgaaccagggcaatcaatctcataatagaccacttgttaacattagaccaatggtaagagtagagcagacagaaatgaaacccaatctattgtatatgttaatgataaatatatatgtgtacacgtgtgcacacacacacacacacagcatccataattcaaaaatcaaaaatctgaaatgctccaaaatttgaaattttttgcgctctgacatgacaccacaagtggaacattccacacctgacctcatgtagtgagttgctgtcaaaactctgtttcatgcacaaaattatttaaaatattatataaaattacctttaggctatgtgtataaggtatatgtgaagcataaatgaatttagtgcttaggcttggggagcatcacaagataatctcattatgtatatgcaaatattccaaaatccaaaaaaatttgaaaaacctctagtcccaagtatttcagataagggatattcaacctgaacttgtgtaactggtgtaactgtacatacatatgcatgtgcatgtctgtgtgtgttccaacccaaacaccatgccattcttcccctgccttgccccatgtcccacatccactcctacccccatttatttgctaccagaactaggtcactttcttgtcccttagactcagtgggagactcccaactcattgtgtttggattaagtagaaagttattctataaccatgtattcaaaaaaaataactttacaatcatttgaaacaaaaccaactattacttttaaaaagctacctgctttcaattaagcaggaaattatctaagaagccacttaatttgctttggtctgtagtcccacaactgctttatgctgagtggagcatgaaattaaatatgtaacaactatcctaatggttatgtttcagaatgccagcattttagattcctaggtataccgagtggtaacaaatacaaaaatgtaccaatcaaagaatatggctgtattgagtttgaggaagaaaaaaacccaaaatattattaatgttctttattttttttagttaaaactgtttttaaaagtcttccgttaattgatgtatctaggaagagctgcagtgcatatatggaaaattttttcagactacaataaactgcatttttttccaaataaatttttacagcattttcttgtgtccaaatgtaaaataaattatgcaaggatacattaatagagaaagtcataatgaatttttactatgtgttgaagaaacactgatactaatctccgtttgaaggattcatctttgtttaaagcaaagacgtgttgtttgcaatggagaaactgtttatgtccacatataaaggcactagtttgtgcaggaaatttcagaagcattacttaaatgacacttcaatcagttcttaacaatgttgtaaatgctagatggttctcagagcctcttatttatttaaaacatttttttcacaactttaaaactatttttaaactagacaaatctttccaaacactaatcatattatgattaaacatttttaaaatagctgtataaatgtggataaaatcatcctcgttcttttgtagttacttattttaacccaatccttttctttctttttctaaaaagtctaggttgacattttggcagttgtattaggaaatgttgacaaacaaatagaagaatgtaactggatttctcttcccccccatatgtgaagcaaggcaagtgtgagctgagagagcttgcaaggttccacagttgctcagcactcatttatttgatgctgaagatgcttaatattctagtttctgtcattgaatctatctctatacttagctatattattcaaaaatatttttcagttttctaaaactgctatcttcaaggattccctgagaagctacaaaaaaggacatcatggtaatttatgggacgttggatatttttctaggacaaaaaatctcctatttctgcatgtatacttcagcttattctgatcagggaaagagcaagaccataatcacacagaatccttgcataagaatctgtgtgaccttgagagagctggttgacctccctgagcccgattcctatgaactgtaaccgtctttcatgtgtacgttgggaataatcataactctctgtcagaattgtgaggattaatttgagataaggtaagacaagcattctgtagagtgactgacacatagtaggaccgtgttgtcatgagttaccgtgattaaagtggtggatcatctcatccttcttttgtagcctctgtctaccagatcctatgggaagcctttcgtgtctgtcatttcattaagtcttcccaacagcctaacgagataggtcttattagtatctcactttacagctgagaaatcacaacagagggactggtgatggttcactgggcatttcaggtaaagaaacaggtaaaggtggtattttgagtttaagaagcctttttccctgaaactcggccaaaagtttttcctacttagaggacctacttgcatttttatcagcctgcagaatgtttctaaacttcaaccgtgtgtcttttggctacacttggaatgttagtaaccaaaagaaagacagacttttggatgatgtggagtttgttttcaccacagccaaatctttgctacggtaaaagatattatagaccaatccgattgcatttcttaaacaatcactaaaatacaaatttaaagataaaaataagtgcctttatatagctgagggtgtgatttatttatacacaagggagtttaattttccaattaatgagtgggttttatgcacatgatgtcccttagttttaatgaataatgtgtgtgtggtatgatagattgctgtgctaaacacatggtgctccctgccagaaagcagatctgtatattataatttgtacatgtgatatcacaccgatgaaatcaagaaaatgaattaattacattcacaaatgtttggtagaccaataatttccaagagtcaggaaattccttaagaaacacctaggcaatagtgttttactaggaaataattgagcaatattttaaaaatctcaacctggaggaaatgatatatcattgaaaggagtgactctaaagataggacctaaaaacaacttggaaccctgaaatttaaaattggttgaatttagattagagcagagacgtcatttgatcttagtgatgtacttgccttatctatccaaatattcattcctgagagcttgacacagcgccaggaaatacactttctcctaattttttttcatgggaagttgcctggaaaataaaattagaaaatgaaagtttggtttcaaggaggggtaaccagctctcaagctggtacaaagtaccaggtttttaaaataaattacccaaatcttagggtttattctatctacacggcatgacctagggttgcagagaatcaaagacttttactctctggtcattcgtagtgccctgtggttcttatgcaaagaaaagagaatagcaccctgggctctgttcctgcgggatttctgtgtaagctttcttcctccttttgcttcatattacacacacacacacacacacacactgtttcaactcttcctctttctctgttgtgtgctctctttcacgcacactcacacaccttttttttttaaaaaaaaaatagataccttaggtgatcagctgcaaaggttgcagttgtataatacattattatttttaaaaatttctatggctttccgacatctgaatcaaaaagcacactcaaaagggaggaaagaagaaaatacaactatttaaactctgcatttcctaaaggcagttacaattatagtgccactttctcaattttacttaaatttactccctgccaacatttgagtgctgacctttccatacttagcaaagtctaggcatgcagtgaatgagttcatgaaaggggcatttcttgggaggtcacaaaaacagaacattattgtggagaaactagaatgattaccaggacatttttttaacataacattttatgattagagaaacccaaatccaatgatctgttttgctacatcatgctcttattatgcctcagtttcttatgtgtaaaaggggtatagaaacatctgtgcccctgcaattaacaggaatgctttttaagataaatggaatagcatatttaaaagacaatagtattatttaacacaggcctggccaatgaactcttactaatcaataccattaaattgattatacaaacaataagaaaattatctttatcaaaatgacctatgagtaagtgttattctagagttcttagctagttctgtaatcacattggccattatgggcctagcatagtgctcagtatgtgtatcttgaatggatggaggaaacaatgaataaatgaatggatatttgaattttcactttggcattagataatttagggccacggaaaagggatggcaggaatatagcatgcataccaatcgttcatcttcccttactaattaattgtagcattctgtcttgctgagactgaaggtaacttcagaatctcaatagaggaacccaagatatctcaatcaacgggagttacatttgaaagaaaatatatttgcaaccccaaaatatttagagagaccagtgatttaaagggcagggtgaaatgatggacatgacacttatctgggacctattaaccctagctgatcttaagtatttatgttcaaacataccaggacacaggagagtcctaagactcaacttttcccaaaacagatgtcactgttgctttgaaatagtataatgtgtgataagaagaaaaagtacattggtaagaagactcaatgtagaaattataattttcatggcagtattattgttattattgctattgtaggtagaaaaggagagaatgaggaaggaaggaaagaaatactttctttgttaggcatacaggaagacttcaaagctaggcagggcttaaaatgaagatctccttatttgaagtcactcattctattatttatcttatcaaaaatattttggctgggtgtggtgactcacgcctgtaatcccagcactttgggaggctgaggcgggcggatcacctgaggttgggagttcgagaccagcctgaccaacatggagaaaccccatttctacttaaaatacaaaattagctgggcgtggtggcacatgcctgtaatcccagctactcgggaggctgaggcaggagaatcgcttgaacctgggaggcggaggttgtggtgagccgagatcacgccattgtactcgagtctgggcaacaagagcaaaactctgtctcaaaaaaaaaaaaaactatatatatatatatatatatatatataaataaaatatatgatttgtgagtactatatgtacacacagagcaaagatctgtaattgaccttggacgtgcaaaaagaataagatgtagttcctgtctttgaggggctccaagtctagggaggaaagtggactgagtaacagtttaacgtgacgtgctacggtagttcagatacctactaaaggtattgaccaccagactctaatgcttttctctctctatccaatagtgactactgttttatgttgaaatatatatcttaatttagaaattaaaatctatagatatcaattgcttaaaaattaccagtcatattgctttattaaaatatacaaggtggactatgtataaaaaattgtagaatttatgcctgaaattaattcacactgggctttatccgtaattcatttaatcagaggaaatagtttgatgttataatggctgcttaaaaagaaaaactgaggagtcaggcttgttttaaaactaaactaaggttttattctttccttcatgaaattactgagcacttgctctggccaaaactttgatggatatatttacagtctagtagaggaaagacaatctatcctggcaacattactataggaaagaaagaaagatgcagcgtaagggagttacaaataaatacaattaaagttcaaggtaggggagagtacttctagccttgtggaattagggtgtgagaaacggttggtaatattggaacattgggtggggcttgaagcaaatacacatggacacatacacacccttatatgtgtatatatatttgtgtgtgtatatataaaatatatgtttgtaagtatgtatacacgcatatatacacatccagatcaagagccaggccattacctgcacatagttttagcttttacatatatgcgtgtatgcatatacaaatgttcaagatgtatcacatacctcaatgtaaaatacatatatgcatgtatacgagtgtacacacatacacacatgcacacatatacatatgattgtatacatatacacatacatatatacatacagagtcatgcatcgcttaatgatggccatacattctgagaaatgcgtcattaggcactttctttgtgcaaacatcatggagtgtatatacacaaacttagtatagccaactacacatccaggctatatggtataggctacaaacctgtacagcatattactgtagtgaataggcagttgtaacagtggtgagtatctgtgtatctaaacatacctaaacagaggaacagtacagttaaaatacggtattattttataagattacaatcttactgtaatcttccatcatccacccagatgttgttatgtggtgcatgattgtacatagtgttttcttttaatagaattacagtaaacatacaacaaagtgtagtgtatagcttgaaaacataaccctgcaactagcatccagatcaagagccagaccattacctgcacatagttttagcttttacattgaggtatgtgatacatgtgatatatcttgaacatttgtattttaaaggtgtgaggtaggattcaaagatcattttttgttatatggtgattcaattatttcagtaccattttctttttcccattgaattatcttggcgtatttgccaaaatcaattgattatttacatatggacctatttatgcactctattggttcttaatggtgcccttttttttagtctgctaaaacaattattatttttattatatatatttaaggtgtatggtgtgatgttttgatatacatatacatcatgaaatgattaaatggtgccctttgatgaacagaaaatcttaatatatatgtttaaaaaatatataattatacttatatacctagcgcttcttgtgtcctatttgtaaaatttttgcctgctccaaagtcatgaagatactctcatgttttcttctaaaagttgtattgttttacctttcacattcagatctacagtccctcttggacagattttcctgtgtgtatatgatatgaggtaagaataaagatttttttccccatagctatccagttgagccagaaccatttgtagaaaattctgtgatttccccactgcattgtagtgagtggcctcttcatcataaatcagttaacctcatgtgtgtgtttcagttcccagactccattctgttccatgaatctatcagtctcttcttttatggcaatatatactgttttaataattatcactccataagtcttaatatctagagtataagctttcttcaacaagaaacgaaatgattattttggttaattttggccttttgcatttttatataaattttagaattttttttgttaattccaatatcgattcaaaatttgctaggaataaaattgggattacgttaatttacagttaaatttgggaagcactgttagctttacaatattgagccttccagtttgtgaacatggtataacccttcatgtatttatgtcttttaacatttctttcctaatattttgtagttttcaatgcagaggtcatgcagatgtttgttaggtttacacctaagtatcagaatttttaaaaaacgacttttgttgatgttttaatgtgtcaatttgactagactacagtctccagttagtcgaacacttacctatgtcatgctatgaaggtattttgcatatgtgattaaagccattaaccacttaaccttaataagagaggttaccctagaaaatctgggtgggccttactgaatagtgggatggccttcaaaacagggctgaagtttttcttttttcttttctttttttttttttgagacgaagtcactcactgtcacccaggctggagtgcagtggcaagatcccggctcgctgcaacctccaccttctggattcaagcaattctcctgcctcagcctcctgagtagctgggattacaggcatgtaccaccacgcctggctaatttttgtatttttagtagagatggggtttcaccatgttggtcaggctggtctcgaactcctcttctcgtgatccgcccgcgtaggcctcccaaagcgctgggattacaggcgtgagccaccgcgcctgaccccaggtttttgttacaaagagatgaaattctgtctgtggatgacagtgctggcctgtgcccgtgagtttcattctgctcatgatctttccttcctggttccctgggctagggatgttggacttgcttagtcagcctccacgatagtaagctaattttctgtaatgaattatctacctacctacataatctatttatcattttatcatctacctcccactggtgctgcttctctaagtgagcactgtctgatacagattttggtactggatgtgtttcgaaaagaacagaatcttaaggatgaattctctgaattgttgctgagcagtacctggaatgatgtagtcaaagcattgctcaaattattgccagtggatgcctctaatcaaatcccaatacctcagaaatattacaacactttaattaaggtcattagataccaaggagcaggaccaggatttaaacctcgatttgttggacgaaggtgttagcagctatgctctgctgctagtgcccataggcactagatttactttgagagaaattaatgttttaagattcacactctatatgattctataggttaaatatcttttttctctttttggtattattgggaagaatatatggtttgggagatgttagatacggggagaaacaccagagggattgacaagcattttctgatcagatttggaatatttagttctattcaaatcttcactactcatttttcagtggtttgtttttactcttgtgatgtcaaagaccatattaattcactcatattcaaaagccaaagagacttaaaagccaaaaagaatgtatttaaaaacaatcttcttgctgtttacagcagcctaatatgtatgagacctctcttcttggaaggaaggatgagcacaaggagctataatgggcttgatttccttggccagcgcgggcagaatgtttttgcatagagatttgcaggaacaatacctgctgcattttaatttttacagagaccgaaagtacgtgtgaaagtatgtgtgagctgaatgcaccccatgtgaaccttgcaattctaatctccaagggaaacaagaacttcatgggtcctaagccacccctggagcaaacatatccaggcacagccgtctgtgaatgagcagggccaaagcatgctgggtgcagagctttacccaaaggactgtttggggcaactcttaattcctaaggcatggggtatgatagggtatagaaaatctgttaggaaaagaacaacctaaagaaaaaaaagggagcaaggaatggcaaaacattggattcgatcttccaacttcattgaaggaaaactgtgtgagattaaagaaagcatgtgccacagatgcagccgggaatggccgggggcgaggcagaagtacaaatgctgctttaatatattggaatagaaagacttctggctcttgtattatgtctcagaaacttcaagtttgctccttgggagatacatttaattaattaatatacattttgctgactttgggatttgcagaaggcaaacagtatttgtattttcatgtctcacaataacctagtgagatggagttgttattcccattttccagacaagctaactgagtccagtgacttgtctaagattctcaaggaagctgggagatacatctcttgaatatttttcaaatagtgtcttgaaaaaataatgagcacttttatttccaaaatatacttttgtgagtctcttagcttctctgattatcaaataacatgttgaggttggcaaggcaggtgttatgatggtaaatgtgcctacttgaggaaactgaggctcagcattgagtgacaccaccattcagccatggaaactagaaaccgtggactacatccattctattccctggccagcgtagaactacttatacactgtaactgtaacctcccagcctttacacagtttctctccctgcaatacccacactgtgatggttaatttcatgtgtcaacttgactgggctacaggatgcccagatatctggtaaagcatcatttctggctatgtctgtgagggtatctgcagaagagattagcatttgaattcatggactgagtgaagaagatccactctcatcaatgtgggtgagcaccatacaatccttgagggcccagatagaacaaaaaggcagaaaaggggtgaatcttcttgagctgggacggccaacttctgccctaggacctcagaattcctgctccttgggtcttgaaaccccagaacttacaccgttggcttgcttagtcttcaggccttgggccttgtactgaattacactactggctttcctggttcttctgcttgcagatggcagattgtgggacctctcatcttccataatcacgggagtcaattcccataatgtattttcttatctctcgcgctctctctatatatatcctattggttcatttctttggtaaactctaactccaactcctgagcctgaccgtcaggcttttgagagagggctcaaggtcaccacagctggagcaggggctgaactgtggctgggacctgtggggctcatctctggagctactggaagaggagtctgcctagtgccccacagctagaaaaaggcgaacattctcgctggggtggggattgggggtgggcaggaaaaagctgttttgcgaatattaagtctttgagggtgttccatacagaattcaccagatgaacagtaccgggccatcacagcctttggctcagtcattcctcaggctaagagaagccctctctttcactaacagagctatcttccaaagtctgctgtgaaaccaaacatcaatgttttgctccaccaacaggctactgagaggtaatgattagctggctaccattgattgagtgctcactaagtgaggaagtgcattacttacgtggcctcattaagacctcttgaggttactccaactgacagaaagggaaaatgaggccgggcaaggcacacagatgtgcccaaagtttcctacttggtaatgagcccaagcagggcctgaacatgtcacatgggagggtgcatgtttgacgcctcttaatttaatttacttcgagccagagcaggaaggaaggtcatttaatactgtacttgaaaactgatttttgctctactaaagatgccactactgaattttcccagggaatgagctgagtcctgctttctttctattaattacctgtgcaggcagccttgcacttttaatattgcctcacacctgagactctttcaaggttatttgactgcatgctaaggtgaagaaaattcttttcaaacattagtgcttaatggacttcagctcaaagcaactgaaccacctacagtgtacagcactgttctgccccccaatccccacccaaataaagataaaactggtccctagtctccaggagcttttagtctttggaaaaagcattatattcaaatgaggtaggtagacattgttctagacagacactaatctgtgacaataagtacatagaatagtgctaatgaacaatgataaatactttgacaaaatgtacttaataatacagagcaatgaccagtcagaaaaatgtcaggtaggatttgaataattccaaggaatatttgatgagagcatttcccctggttttaagggtaattttgaaagtattaatttgttgcatgagatttaaaaaaaaaaacccatattaccacttaattaaaatttttttgatatagacttagggagaagtggtcaagagtagccaaccatccgctttgtcaattctggatagagtcagaagaaaaatactatttcctatgtgtagatattccatgaattaatacaaaacatcagttcttagaatagtcattggtgtatactataaattcagcaaatattagatactatttcagcaaatatttgatattattattacgtctttgatgaagcaattgtttgtatttcagggaatggttcaaatgaatatgttacataatgcataatgttttgtgattgagttggatcccctgtggtttatttttccttgcaaaaagtcaggcttttccattttgtatttttgtcagtagagtgtcttaggtaaaatgcatagctttgtagcccagctcaataactacaccccttcaggtattttctggtatttatttcacaaatccgtacatttttaaaagaacagataccgtttttagtaattcaaaaatgttttctaggtacttgtttatattcaaagtctgttatcttggatgaacattccccaaaacatgcaccagacatttttctcatattttggattgtcaatgtgaaatgtacttaaaatttcccacagcatcagttttctttgtaaattttcaacacatttcatatgcttctataacagataatgccttgttctgcatttactttcaagaaaatgacttctatggttttatacctttacctcatattaaaaatacactaataagcttgttgtcacggggaactatctttgtgtcaaactgaatgtagcatttgaagaagccatttacaatgaggaagtttccatttctgagcactgttgatattaaggtgctgaattacctgccctggtggttaagtgttcccagccattgctgtcttgctcaactgacttgaattttgtagaagctgaactatttgcaggtcacaccgttatgtgcaaggtgaaagttcttccctagtaaggaacacttgaagtataaatagtaagcttagtagagtgaaacaaattgcctgtcgtgatgaactcactgatgtgttatttgtgttcctttctgtctacttagtcaatataatgaaaataatatgttctcataaaaatttggaaattatagaaaggaataaaaaatacgcatcgacaatcactgttaacatttttatgtatgtcttttgatctcctgtgtgtattaaaaaatcattgagatatgtacacatcattttgtatctttttaaaatacaggctgagcgcagtggctcacgcctgtaatctcagcactttgggaggccaaggcaggtggatcatttcaggttaggcattcaagaccagcctggccaacatggtgaaaccccatctctactaaaaatacaaaaaattagctggccgtggtggcaggcgcctctaattccagctactcgggaggctgaggcaggagaatcgcttgaactcgggaggcagaggttgcagtgagccaagatcgcaccacttcactccagcctgggcgacagagcgagactccgtctcaacaaaaagacaaaaaaaaaatacatcccattatagcattttcgatctgccagtcattttttctataatcataactggctaatgtccatgtttgtaaatatagaatcctgtattttagacttgccagccaacagactatactcacatattgttttctcatgtctgtagtcatttggtccatcatagattaaatgtccatgaatagaaaatgtgagtctgcttggccaggtgcggtagctcacgcctgtaatcccagcactttgggaggcctaggcgggtggatcatgaggtcaggagatcgagaccatcctggctaacacagtgaaaccccgtctctactaaaaatacaaaaaattagccgggcgtggtggcgggtgcctgtagtcccagctactcgggaggctgaggcaggagaatggtgtaagtaaacctgggaggcagagtttgcagtgagccgagatcacgccactgtactccagcctgggcaacagagtgagactctgtctcaaacaaacaaacaaaaaaggtgtgtctgctttaagacattgccacatggctcaaacattcacttgatgtctcttcattttatttgtctatgtccataaccttttggaaaaatttcattgattaatttgctcgctattctgagatagaagtaaggcatcagagcagtttatttcttgatatcactcctgctcactgttttgaagaggcctagcaagtagaaaacttaaagtagttttcctagaatagaatatcaaccgggaccagtaactccacaatcgttgttacggaagagtccatacttatgtccacaaattacatatattatgtaaccctgacatctaaactcaaggaagaattttacattattctgattacaataaagggtgatgggtgcaccaaaatctcggaaatcaccactaaagaacttattcatgtaaccaaacaccacctgttcccccaaaaacctatggaaataaaaaaataaataggagcatttgtaaaataatatttttaacttaatatattgctaggtgactttttttgagttgaggctgatattttgcactgtgaattccaccagtctaaaaataaagcttctggaaagcttttcctggatatgaactgtagtaatgaggaggcacctgcatgtccacataggatatacatgggattgattgcaacctcctattttttgttagctttattgaggcataatttacatataataaaattctttttttggccaggtgcggtggctcacacctgtaatcccagcactttgggaggccgaggagggtgaatcacctgaggtcaggagttcgagaccaacctggtcaacatggtgaaaccacatctctactaaaaatacaaaaattagccaggtgtggtggtgcatgcctgtaatcccagctactcgagaggctgaggcaggagaattgcttgaacacgggaggcggaggttgcagtgagccaagatcatgccattgcactccagcctgggcaacagagtgaaactctgtctcaaaataaataaataaaaattaaaaaattcattttttttcttttagatacaggatcttgcacactgcacaggatggagtgcagtggtgtgatcatagctcactgcagcctcaaactcctgggctcaaggcatcctcttgccgcccaagtagctgggactacaggtacacaccaccacactggccaactaaaaaaattctttttttgtagagacgggaatctcactgtgttgctcaggctggtcttgaactcctggccttaagtgatcctcctgcctcggcctcccaagtcgctgggattgcaagtgtaagccactaccccggcctaaaattcaattttaagcgtataatttgataaattgtgacaaacatatgcagctctgtgacaactaccacaatcgtgatatagaacatttccattacgactaaaagttgcagtgggcctcttggcagtgacttccttcacctgcctctttactccatggtaataatgatctgctttttatcactatagtctggcttttctagaaattcatatacatggaactttatagtcttttttgtctggttctctcatttaatataatgctttttgtaacatcttattgtttgttatcagttcattcttatttgttgctaaataatatttcacttattatttaatctcttcaccagttgataggtatttgagttctttctagtttttcacaattactgacattaaaaataaagcagctctgaacttgagcacaaattttactttcatttttcttgggtaagtacttaacagtggaattgctgggacatatagtatgtgtatatttaactttataaagaactgctttataatttttttccaaagtggcagatccatttgcattcccataagcaatgattaaggcaagaggattgcttgagcccaggagtttgaggttacagtaagctataaccatgccactgcatttcagcctgaatgacagagtgagaccctgtctctaaaaaaaaaaaaaaaaaaaaaaagaacaaacactttgtatacaaacctttatagttacatgttaatgcaaatattttctcctaatttgtaggctagcttttcatttccttaacagtgttttttaaatagcaaaattttttagcaaacttttaacattttgatgacatccagtcaattttttctttttgggtcctagttaaaacatatttgcccaatccaaagtcagtaacattttcttctatgccttcttctagaagttgtacaattttatttttatatttgtctctgtgatccattttttttttttttgagacagagtcttgatctgttgcccaggctgtagtgcagaggtgtgatccctgctcacagcaacttccgtctccctggctcaagcgattcttgtgcctcagcctcctgagtagctgggattgcaggcaggtgccaccacacctggctaatttttgtatttttagtggagacagggtttcaccatgttggccaggctggtctcaaactcctgacctcatgttatccacctggttcggcctcccaaagtgctgggattacaggtgtgagccaccgcacccggcctgtgattcacttttgagttaattttttggtgtatgtgaatcaaatgttatgtttcacttttttgcatatggatttttttttctagcaccagttattgaaaagtttttcatttttccattgaattttcctagaatagttgtccagaaaacctccaatttgttattgtgtatgtgatatggtttggctctgtccccacctaaatctcatctcaaattgtaatcctcacttgttgggggaggtagctggtgagagatgattggatcatgggagttgtttcccccatgctgttcttgtgatagtgagggatttctcatgagatctgatggtttaaaagtgtctgtcagtttccccttgtctctcccctgtcaccatgtgaaggtctttgcttccttttcaccttctaccatgattgtaagtttcctgagacctctccaggtatagggaactgtaagtcaagccatttttcttcataaattacccattctcaggtattctttagagtggtgtgaaaacagactaatacagtatgggtctatttctggactctagtctatttctggactctctagtctatttctttgtctatcttaacaccatagcacaccatcttaattattgtagttttaaaataaatcttgaaattaggctgtgttcatcttctaactttgttgtttttcaaagttgtttcagctagtctaggtcctttgtatttctatatgaaatttaaagttaccttgtgaatttcttcaaaaaatgtcttttacccacaaagtataaggaacttttattcagaacatacaacttttacccacaaagtataaagaacttttatccagaatatataaatatttaatacacatttatagcaaggagtagagtttggatggagatgggacatttctgtaaagcttatcctatgttcctttagcacttctgtccaaagcagctctagatgacttgtactagtaaaggtgcacattaagttaagggtccaagaacatttcagataattcttaaagtatttagaaatgtgaatatacttttgatgctcaggcctggtttctgaaagcaatgggcaagtcagaccataaggcaattcagatcttggcggtatcgcattaaaaataggctgcatcttttttagtagatgtaggttctgctaatgattgctgcaaccagaagtcaaaacttctttcttacacacagtgtagaaagaactgcagttctttttatttatttatttattattattatgctttaagttttagggtacatgtgcacaatgtgcaggttagttacatatgtatacatgtgccatgctggtgcgctgcacccactaactcgtcatctagcattaggtatatctcccaatgctatccctcccccctccccccaccccaccccacaacatgctgctataaagacacatgcacacgtatgtttattgcggcactatttacaataacagagacttggaaccaacccaaatgtccaacaatgatagactggattaagaaaatctggcacatatacaccatggaatactatgcagccataaaaaatgatgagttcatgtcctttgtagggacatggatgaaattggaaatcatcattctcagtaaactatcgcaagaacaaaaaaccaaacaccgcatattctcactcataggtgggaattgaacaatgagaacacatggacacaggaaggggaacatcacactctgagaactgcatttcttgcagccacaactccaacatgcccatagcactcatgatcagccttgaatatgtaagacagtgttgcagtgtcctggccttgctggtggcagctgtgggcatggtcctctctaaactgaatcttttgttccacattatggtcatgttattccagaacctagatccttttttttttttttgagagggagtctcgttctgtctcccaggctggcggcagtagcgtgatcttggctcactgcaacctccacttcccggtttcaagcaattctcatgtctcagcctctcaagtaactgggactacagctgcacgccaccacgcctagataatttttgtatttttagtagagatagggtttcaccatattggtcaggctggtcccgaactcctaacctcaggtgatccacccacctcagcttcccaaagtgctgggattacaggcatgagtaactgcacccagccagatccgtttttaaaactatcttccttagtgcttcttttttattggattcaaatgccagtagctagaagctactaatttattgaggctttaccctgatactgtttacaatgcatcttttcaggcatatatcatatttgtggatcagacattgacaattacaaggcactgaaatgattatattcaattgccacaattgaagcccttgaaataggatacctgagataatgcattccacattcgtgtctcatttgatgatcaatgtattaatcagaatcagagatgatagcatattatatacttgtcaaaataaacttattagaaatatattagttctaactaaaatcttgcattgatttatcatttgttttattaatagtaagcattacacctgctctcaaatcttctaattaaaagaaatctgtttcctagacagattgaagttaaatggttagcataattcctgtgtgtgtgtggagagaaaagatagtagctcactggcatactccattggcatgccttactttcaggaaaacagagaagaacagctacaggaagcaattgatatccctacacaggttggggttgatatgcaaatttataaacacaatgtttccattctgggtaagctatacagaatcacaccagcaggggtttgatactgtattttcttctgttttagctgtgttgtcatttcagaagctgtgaaactaagaatctctaaaagatgtgttaagagattcaaaaccccagcagagaactatgtaacaataagcaatcatacaaaaagtaaacaataaaacattcaacaatacaaggagggttttacaaaatggatttacaaatttggggtagtatcagtttaatatgacttttgttactccttattgttaacatagtgcttaaggaacttttaaaggtagtgtacaaattggattagtccagagctagttagggaatagtttattattattattattattattttttattttttatttttgagacagttttgctcttgtcacccaggctggagtgcagtggtgcaatctcagctcactgtaacctctgcctcccgggttcaagagattatcctgcctcagcctcccaagtcgttgggattacaggtgcctgccaccatggccagctaattttttgtatttttagtagagatggggtttcaccgtgttggccacgttgctctcaaactcctgacctctggtgatctgcccgccttggcctcccaaagtgttaggattataggcgtgagccaccgctcctggccgggaatagtttttgtctttaattaagctctgttttacttctatataggcataactcagagatatcacaggtttggttccagaccaccacaataaagcaaatatcatagtaaaacaagtcacacatttgttttttggtttctaaatgcacataaaggttacactataccatatatactcatattaagtttacactataccgtatatagtctattacactatgccatacatactctataagtttacactataccgtatatactctattaagtttatactataccatatatactctattaagtgtgcaatagcattatggcttaaaaaacttgcataatttaaaaatactttgttgctaaaaattgccagcaatcatctgagacttcagtgagtcataatctttctgctggtggagagtcttgtctggatgtggatggctgctgactggttaggttggtggttgctgaaggttgaggtggctgtggcaatttgttaaggcaacactgaaggttgccacattggttgacacttcctttcacgaacgatttctctgtagcattcaatgctgtctgatagcattttactcacatagaacttctttcaaaattggtgtcaatcctctcaaaccccggcactgcttaatcaactaggtttatttaatattttaaattcctctttgtcattcaacattgttcatagcaccttcatcaggaaaagattccatctccagagactgctttctttgttcatccataagaagcaacttcttatgcgttcaagttttattgtgagattacagcaattgtcacatcttcagactccacttcttttttttttttttgaaacggagtctcgctctgtcgcccaggctggagtacagtggcaccatttcggctcactgcaagctccgcctcctgggttcatgcccttctcctgcctcagcctccacgcccccgccaccacgcctggctaattttttttttttgtattttttgtagagatggggtatcaccgtgttagccaggatggtctcgatctcccgaccttgtcatccgcccgccttggtctcccaaagtgctgggattacaggcgtgagctaccgcgcccagcccagactccacttctaactctagttctcttgttatttttaccacatctgtgattctttcctcccctgaagcctagaacccctcaaagtcacccattaggtttggaatcaacttcttccaaactcctgttaatggtgatatttgacttccttccattaatcatgattcttttttttttttttttttttttttttttagagacagggtctcactctgttgcccaggttggaatgcagttgcatgattatggctcactgcagccagccttgaaatcccgggctcagtcgatcctcccacctcagccttccaagtcactgggactacaggcacatgccaccatacccagttagtttttttttcttttttttttttttttttttttattttttttttatttttttttttttttattatactctcagttttagggtacatgtgcacattgtgcaggttagttacatatgtatacatgtgccatgctggtgcgctgcacccactaatgtgtcatctagcattaggtatatctcccaatgctatccctcccccctcccccgaccccaccacagtccccagagtgtgatattccccttcctgtgtccatgtgatctcattgttcaattcccacctatgagtgagaatatgcggtgtttggttttttgttcttgcgatagtttactgagaatgatggtttccaatttcatccatgtccctacaaaggatatgaactcatcattttttatggctgcatagtattccatggtgtatatgtgccacattttcttaatccagactatcattgttggacatttgggttggttccaagtctttgctattgtgaatagtgccgcaataaacatacgtgtgcatgtgtctttatagcagcatgatttatagtcctttgggtatatacccagtaatgggatggctgggtcaaatggtatttctagttctagatccctgaggaatcgccacactgacttccacaatggttgaactagtttacagtcccaccaacagtgtaaaagtgttcctatttctccacatcctctccagcacctgttgtttcctgactttttaatgattgccattctaactggtgtgagatgatatctcatagtggttttgatttgcatttctctgatggccagtgatgatgagcattttttcatgtgttttttggctgcataaatgtcttcttttgagaagtgtctgttcatgtccttcgcccactttttgatggggttgtttgtttttttcttgtaaatttgtttgagttcattgtagattctggatattagccctttgtcagatgagtaggttgcaaaaattttctcccatgttgtaggttgcctgttcactctgatggtagtttcttttgctgtgcagaagctctttagtttaattagatcccatttgtcaattttggtttttgttgccattgcttttggtgttttggacatgaagtccttgcccacgcctatgtcctgaatggtaatgcctaggttttcttctagggtttttatggttttaggtctaacgtttaaatctttaatccatcttgaattgatttttgtataaggtgtaaggaagggatccagtttcagctttctacatatggctagccagttttcccagcaccatttattaaatagggaatcctttccccattgcttgtttttctcaggtttgtcaaagatcagatagttgtagatatgcggcattatttctgagggctctgttctgttccattgatctatatctctgttttggtaccagtaccatgctgttttggttactgtagccttgtagtatagtttgaagtcaggtagtgtgatgcctccagctttgttcttttggtttaggattgacttggcaatgcgggctcttttttggttccatatgaactttaaagtagttttttccaattctgtgaagaaagtcattggtagcttgatggggatggcattgaatctgtaaattaccttgggcagtatggccattttcacgatattgattcttcctacccatgagcatggaatgttcttccatttgtttgtgtcctcttttatttccttgagcagtggtttgtagttctccttgaagaggtccttcacatcccttgtaagttggattcctaagtattttattctctttgaagcaattgtgaatgggagttcacccatgatttggctctctgtttgtctgttgttggtgtataagaatgcttgtgatttttgtacattgattttgtatcctgagactttgctgaagttgcttatcagcttaaggagattttgggctgagatgatggggttttctagataaacaatcatgtcgtctgcaaacagggacaatttgacttcctcttttcctaattgaataccctttatttccttctcctgcctgattgccctggccagaacttccaacactatgttgaataggagcggtgagagagggcatccctgtcttgtgccagttttcaaagggaatgcttccagtttttgcccattcagtatgatattggctgtgggtttgtcatagatagctcttattattttgaaatacgtcccatcaatacctaatttattgagagtttttagcatgaagggttgttgaattttgtcaaaggctttttctgcatctattgagataatcatgtggtttttgtctttggctctgtttatatgctggattacatttattgatttgcgtatattgaaccagccttgcatcccagggatgaagcccacttgatcatggtggataagctttttgatgtgctgctggattcggtttgccagtattttattgaggatttttgcatcaatgttcatcaaggatattggtctaaaattctcttttttggttgtgtctctgcccggctttggtatcagaatgatgctggcctcataaaatgagttagggaggattccctctttttctattgattggaatagtttcagaaggaatggtaccagttcctccttgtacctctggtagaattcggctgtgaatccatctggtcctggactctttttggttggtaaactattgattattgccacaatttcagagcctgttattggtctagtcagagattcagcttcttcctggtttagtcttgggagagtgtatgtgttgaggaatgtatccatttcttctagattttctagtttatttgcgtagaggtgtttgtagtattctctgatggtagtttgtatttctgtgggatcggtggtgatatcccctttatcattttttattgtgtctatttgattcttctctctttttttctttattagtcttgctagcggtctatcaattttgttgatcctttcaaaaaaccagctcctggattcattgattttttgaagggttttttgtgtctctatttccttcagttctgctctgattttagttatttcttgccttctgctagcttttgaatgtgtttgctcttgcttttctagttcttttaattgtgatgttagggtgtcaattttggatctttcctgctttctcttgtaggcatttagtgctataaatttccctctacacactgctttgaatgcgtcccagagattctggtatgtggtgtctttgttctcgttggtttcaaagaacatctttatttctgccttcatttcgttatgtacccagtagtcattcaggagcaggttgttcagtttccatgtagttgagcggctttgagtgagattcttaatcctgagttctagtttgattgcactgtggtctgagagatagtttgttataatttctgttcttttacatttgctgaggagagctttacttccaactatgtggtcaattttggaataggtgtggtgtggtgctgaaaaaaatgtatattctgttgatttggggtggagagttctgtagatgtctattaggtctgcttggtgcagagctgagttcaattcctgggtatccttgttgactttctgtctcgttgatctgtctaatgttgacagtggggtgttaaagtctcccattattaatgtgtgggagtctaagtctctttgtaggtcactcaggacttgctttatgaatctgggtgctcctgtattgggtgcataaatatttaggatagttagctcctcttgttgaattgatccctttaccattatgtaatggccttctttgtctcttttgatctttgttggtttgaagtctgttttatcagagactaggattgcaacccctgcctttttttgttttccatttgcttggtagatcttcctccatccttttattttgagcctatgtgtgtctctgcacgtgagatgggtttcctgaatacagcacactgatgggtcttgactctttatccaacttgccagtctgtgtcttttaattgcagaatttagtccatttatatttaaagttaatattgttatgtgtgaatttgatcctgtcattatgatgttagctggtgattttgctcattagttgatgcagtttcttcctagtctcgatggtctttacattttggcatgattttgcagcggctggtaccagttgttcctttccatgtttagtgcttccttcaggagctcttttagggcaggcctggtggtgacaaaatctctcagcatttgcttgtctataaagtattttatttctccttcacttatgaagcttagtttggctggatatgaaattctgggttgaaaattcttttctttaagaatgttgaatattggcccccactctcttctggcttgtagggtttctgccgagagatccgctgttagtctgatgggctttcctttgagggtaacccgacctttctctctggctgcccttaacattttttccttcatttcaactttggtgaatctgacaattatgtgtcttggagttgctcttctcgaggagtatctttgtggcgttctctgtatttcctgaatctgaacgttggcctgccttgctagattggggaagttctcctggataatatcctgcagagtgttttccaacttggttccattctccacatcactttcaggtacaccaatcagacgtagatttggtcttttcacatagtcctatatttcttggaggctttgctcatttctttttattcttttttctctaaacttcccttctcgcttcatttcattcatttcatcttccattgctgataccctttcttccagttgatcgcatcggctcctgaggcttctgcattcttcacgtagttctcgagccttggttttcagctccatcagctcctttaagcacttctctgtattggttattctagttatacattcttctaaatttttttcaaagttttcaacttctttgcctttggtttgaatgtcctcccgtagctcagagtaatttgatcgtctgaagccttcttctctcagctcgtcaaaatcattctccatccagctttgttctgttgctagtgaggaactgcgttcctttggaggaggagaggtgctctgcgttttagagtttccagtttttctgttctgttttttccccatctttgtggttttatctacttttggtctttgatgatggtgatgtacagatgggttttcggtgtagatgtcctttctggttgttagttttccttctaacagacaggaccctcagctgcaggtctgttggaataccctgccgtgtgaggtgtcagtgtgcccctgctggggggtgcctcccagttaggctgctcgggggtcaggggtcagggacccacttgaggaggcagtctgcccgttctcagatctccagctgcgtgctgggagaaccactgctctcttcaaagctgtcagacagggacacttaagtctgcagaggttactgctgtctttttgtttgtctgtgccctgcccccagaggtggagcctacagaggcaggcaggcctccttgagctgtggtgggctccacccagttcgagcttcccggctgctttgtttacctaagcaagcctgggcaatggcgggcgcccctcccccagcctcgttgccgccttgcagtttgatctcagactgctgtgctagcaatcagcgagattccgtgggcgtaggaccctctgagccaggtgtgggatatagtctcgtggtgcgccgtttcttaagccggtctgaaaagcgcaatattcgggtgggagtgacccgattttccaggtacgtccgtcacccctttctttgactcggaaagggaactccctgaccccttgcgcttcccaggtgaggcaatgcctcgccctgcttcggcttgcgcacggtgcgcacacacactgacctgcgcccactgtctggcactccctattgagatgaacccggtacctcagatggaaatgcagaaatcacccgtcttctgcgtcgctcacgctgggagctgtagaccggagctgttcctattcggccatcttggctccagttagtttttttttctcctggagacagggttttgccatgttgctcaggctggttttagtctcaactcctgggctcaagttatcctccaccacagcctcccaaagtgctgggattacaggggtgagccactgtgcccggccatggttgttcttaatggcatctagaatggtgatccctttccagaaggttttccatgtagtttgcctagatccatcaggggaatcactgtctatggctttacaagatgtatttcttacataataagatttgaaagtcgaaatgacgccttgatacatgggctacaggatgaatgctgtattagcaggcatggaaacaatgttcatctcctgtgcatctccctcagagctcttgggtaaccaggtgcattgtcagtgagtagtaatatttgaaaggctttttttttcccaaatgaaagatctcaacagtgggcttaaaatattcagtaaacctcccagcactttgggaggctgaagtgggcagatcacgaggtcaggagatcgagaccatcctggctaacacagtgaaaccccatctctactaaaaatacaaaaaattagccaggtgtggtggcgggcgcctgtagtcccagctactcgggaggctgaggcaggagaatggcatgaacccaggaggcggagcttgcagtgagtcgagattgcgtcactgcactccatcctgggcgacagagtgagactctgtctcaaaaaaataaaaataaaaatacaaataaaaaattaaaaattaaataaaataattaaataaaataacttaaaaaataaataaattaaaaattaaaaattcaataaaccatgttgtaaacagatgtgctgtcatccaggttttgttgttttatttatgaagcagaagtagagtagatttagcataattcttaagggccctaggatttttggaatggtaaatgagcactagtttcaacttaatgacaccagctgcattagtccctaacagagagtcaacctgtcctttgaagctttgaaaccaggtactgacttcttctatctagctatgaatgtcctacatggcatcctcttccaatatagggctgtttcatgtacaatgaaaatcggctgttcagtgtagccaccttcatcaatgatcttagctagatcttctggataacttgctgcagattctatatcagcacttgctgcttcaccttatcctttgatgttctagagatggcttctttccttaaacgtcatgaaccaacctcagatggcttctttccttaaacgtcatgaaccaacctctgctagcttcaggcttttcttgtgcaacttcctcatctctctcagccttcatagaattaatgagagttagagtcttgctctgaattaagctttgacttatgggaatgttgtgagtgttgtggttggtttgatcttctatccagaccacttaaactttctacatagtagccataaaactgttctgtgttcttatcatttgtgtgttcactggagtagcactttttaatattatttttgaattacttttcctttgcattcacaacttggttaattgtttggtactaaaggcctagcttttagcccatcttggctttatatatgccttcctcactatgcctaatcatttctagtttttgatttaaagtgaaagatgtgcaactcttacttaatcacttagaggccattgcagggtttttaattgcctaattttaatattgttgtgtctcaggaaatagggaggcccaagggaaggagagacatggccaaatggctggttggtggagcattcagaacacacaaaaccacacaacatttgtgtattaaatttgccattttatatggatgcaatttgtgccactccccaaaattacagtagtaacatcaaagatcactgatcacagatcaccataacagatattacaataatgtgaaagtttgaaatattgtaagaattaccaaaatgtgacacaaagacacaaactgagcacatgctgttggaaaaatgccaagaggcttgctcaaagtggggttgccacaaaccttcagtttgtaaaaagaaaatacaatatctgctgggtgcggtggcttgtacctgtagtttcacctactctggaggctgaggtgtgaggattgcttgagccccggagtttggggctgcactgagctgtgatcacaccactacactccagcctggacgtctgagtgagaccctgtctctaaaaaaaacaccaaaacaataacaacaaaactcccgatatctgtgaagcacaataaagtaaggtatacccgtatgtcccagaggttcttgtatacacattgcaatgaattttggggggattaagcctacttctcagcatccctcattaaaattaaagtacagaaaatctatatgtagctctactttttagcaaatctctgaattggttcttagaatagtcacaggaaaatcagaagtgagtaaacttggagattctaggccttcatttcagccagatagaaagaagcctatcagatcttttctcttttcctggtgggaatccatccttcccatatagcttcactacgtgtccccaggagtggccaaacagcctccctgtcttcaagatcagtcccactttagaaaggaaggactgcattgatttatatataacaactctaaaggctattgatctcactctgatctggaactcagttatggcaatacattcctagatagcttccaggacccaagtttctattctactaataattcctcctactgtaagttgtaaagaggtaggttccagtttctctgtgatcttgaagtagaacaccaacataaagaaaggcaggaataaaacacagcagcagaaagaacacagtagttcacctgggcttttcctgggccattattcatggccgtctttgtatccagcatgatttcaagcccaggggatgaatcctgtttcaggtcctgatttccagttggcttcctcgttttgtagttcatctaacctgataatctaatgaaaaacaaagcaagtagcagaatctggctttctgtctagtgctcattctattaaattacattgcatggccatctgaacaaaaacccatatgggacttcactttattcttcacttatctgccgtttatttttatttttctgactctgttgaacctgatgatgctgcaaaatgaagttttgtttacttactttagaaaagaagttgtgataattgggtggttactgacagtctgttcactagaggagacacttcaggcaggaatgatttatttgaagagattgatatcagtttaggaaacagtaccctgaacctcccgatcatgatcctaaattggccattacagtattgggattcaccaaattacagtttttacaaaggcattaaatagggagtggcaggggatgagaggaatcttgcttggtgagcctttactctcatttagaaaggaaaatctttgttaactagtacaattcctttgggtttgtgtatgcagaaagccccagcgaatattctcttaagctcattgtcctaaccaggatcctatggcaacatgattggtcacatgacctactttaattctaaaggaggctagaaagccagtatactgatttttgactttgtagtgagagtcaagcaagagaaaggagggtaagaaatggttgtcatgtctgccacaaataatcttctcatttctttgttcattcaccttcctagctcttaatcattagttcttcatatttattcccttatgctgttggttatatttttctctgtgtacatttagttccttagtatttctccattactgatgggataaagttcaaaatccagatgaaagtatctgagatcctttatgcttggcttctgcccttgtttccagccacctctatttccattcccttaaagacactgggatgctactatgaggatactggttttttgtttgtttgttttgttttgttgtgttttttggcaaagtcttgctctgtcacccaggctggagtgcagtggcatgatctcagctcactgcaacctccgcctcctgggttcagtcaattctcatgcctcagcctcccgagtgagtagttgtgactacagcactggctatcatccctggctaattttctctgttgtttttcaaaagtggcagagtgtctcaggcccatgttgccacgcaatgtagttagcatttagtcattaatcaagataatctcaatcaatatattaataatatattgataatatatcccaaggccatcccaccgttagcactgattatgcctcatcataatggttttcttacgtggttgtcttttcctacatttgaagatttcttgtctagtggggccaacagacatgggaacagtgcctggcccagggcaagcattcaatatatgtgcagtggagactatgagagccccaagggaaaaaaccatcttttattattttcttgttttcccaataacagcccaacagagttaataaccctagtcaatttgttaaaaaaaattaatttgattcattgatgaaccaaatgagtgaaagacattttttaaaccttataacatcaatggagatttatactgttgttagcctatcgctttggtcattatagaagatcctggctgcccaatgtaccatagtggccatagcatctcttttcctattctcttctcccaagaatgtgtctttaagtgtgtttgtgtgacttccttatctttatttttctttctttacttctaacttccccaccatcaataatggtaatttcatattcctcatggcttgtctgctcatgtccgattcacactatcatcaggtagaagacacttctctgcctcagcggagtaggaatagtctttgtatccaaaagctaggataatctaaatattctagcacaaaaaccatttaatattcacagcactgacctctggcaaacggattttgtgcgcagtgccatgaagcttgattaatcgaggaatgaatcattttttccccacagaaaataatctgaagactatttagttttcttatagatttttcattctattaaaaatgaaaatactgagttcacattgcttaatacatactaatatagatctcagaaaattctctggtttgttttataccttcccacagggtgtgagtatccccagggtatctataggagttgtcagggagacagactatcattagaacagtagtgagtcagccggcttgcttcataataggtaaaagaatatctccagtataagaggaccacctaaataatggaagagataaaagtaaaatggtgtatctttagatacatatttattttttatatgcatacatgtttatgtcagagctactgatgactcttagaagtacaagcccatgaaatttggatttcttcggcaggaccctattggacagtaacaacaacagaaaatctcttctgcctgtttaatttacttggaggcatttgcagaggaaaattgggaaacgggtgaagttttactattattctttcagtaaacacttatttggaggtgactgggaaaaaccacatcctttgggagttagtcagatgtgggatggaagccatatactggttgtgtgactttggggaagctgcttagtcattttaaactttggtgtctacatctgtaaaagacaggtaatgttccttattgcaagggttgcatggataggagtactcagtggtaagtacttaataaatggtggccattaccattactgttattactactgttactacctcgcacatgcctggggaactgcgtaagactgggcacaatccttgctcacaaggagctttcactttacttggggtggaggaccataaacaactaattatatcataggacagcataattttaggggaataaaaagggtataaacaaaacattatgggatgagagaatgggtaaattgggactacatggagacaacagagaaagcttcacgaggatgaggaatctgtgctgagcctcagaaatgagcaggatcttcacggagaaaggggaaagggactgattttgttaacacccaaactgctcttctctttaagcccatttgcttacagttgtttctaccttattcttcctcctttctacaattagtagcctcctcaggtaagaataggctactattgtctgtaggggaagtattctccgttgttatattatgtgtaactgctgtgtggaaggcatatggaagcctgtgtggtcataaggaactgttgtgtggtggtctgtgtgtaaaggtcagggatctactggatttgagtgggtatcagtcaccttggaaagagtgtctgaggctggacagccaaaacccagagagacaaatcctggtgggcggcagggtgtttcttttgatctgacccatgagcttagtcaggtgtcagagaggtggttccctttggaaggtgtcagcagcttccctacagagatagattggttatggggagttactggggaacctaagcaacttaacggagaggctgtgggggtcctttggtgccctcaagtgagcaagcccttgatgtgagccaggtgtgaccttactctgtgaggtcatgcacacctgggtttggattccagctctgtcatttaccaatgattgattctgggcaagttcctaaatctctgagtcttgtaccacttacaaagcatgaataatgaaaccttccctatctgattgatgtggggacaaaatgaaatagctcccagacatataaagcccctagatacagagtcatagcatgtgacttccctttctttctttccttttcttgttttctctatttcccctgctcctgtcagcgttgtattttaatacagaataaagacctgggtgttccagtcagcatctgctatgttagaggcactaagaaaagaagttttagccatacatgactcagaatattaatggaagagcatggtattcctgagggttagcatgggggctgccacagtaaccacagggagagaacccaaaggggtaaaactggtgaggaggctgggtgtgatggctcatgcctgtaatcctagcactttgggaggccagagcgggtggatcacttgagatcaggagttcgaaaccagcctggccaacatggtgaaaccctgtctctactaaaaatgcaaaaaaattagctgggcgtggtgacaggagactgtaatcccagcttcctgggaagctaaggcaggagaattgctcaaactcaggaggaagaggttgcagtgagccgagattgcaccactgcactccagcctgggagacagagtgagactctgtctcaaaagacaaaacaaaacaatacaaaaacaaagcacaaccaaacaaaacaaaaaactggcaagcagtggaacaggaaagagtcgatgtcccacgaagccaaccttcctcagtagtagattctccttccagtgctaaattttaacggctttgaattttactaagagaggaggtaccccttctaaggatatccataccttaatgtaaaattaagtaaatgtatagcttcttctagagccatttttgaaatgaaaaaatttgcctcacatgaaaggaattttaagaattcttaggcagtcagggaagattttgtgggggaggacaagcctggaggacagggaaatttactcaaggtcactgtactcaggaattaaacctttacataagtggttttatcgtagtggggcagaagcccagaaattccagtttttaacctgttcagcctcatttgatgagcactggtgaattaatacactactgcatttctctggcttggctaatttgggtggttttttttgttagttttttttgtgtgtgtggcaaaatctcgctctgttgcctaggctggagtgcaatggtgtgatcttggctcactgcagcctctgcctcccaggttcaagcgattctcctgcctcagcctcccgagtaactgggattacaggcacccaccaccacgcctggctaatttttgtatttttagtagagacggggtttcaccatgttgcccaggctggtctcgatacctgacctcaggtgatccggccctcctcagcctcccaaagtgccgggattacaggcatgagccactgtgcccagccaatttgactgtattcttatagcgaggctaacttttatctatcagtatttaattcttctttaatggtgcctgcaaagaaaaagaaaaatagaactgaggcaaaaaggctatatggtacaaatatatgaggatagagtggatttggtctaaatgatccagagcatcgtctcaatcctcagtcttcttttcttctgaacatgtttgagtctagtggagaaaagctattttcctaataagaaactagaattgagattaagctaatcctacttttgaacttgcagtgtgaaaatcatggttccttgggaagaaagtctttgttaaaattcaaattctatttgagacatgcatatttcacagttccaggtggaatactatccatgtttatgtggccatctcacatgcaatatgcaagtaaactttcttaagtaactggataaaggtggcctgcaaatgtttgtgagtgaagcacttctaattctgtaaattgtactaatggatatgtgaaaaacctaatgggttagagttaggaggccaactgatttgcaattatacatgcattactctcaatgtgaaagtaatcaagagtgctgagtatacttgggtcttaatgctgtgattctcactgatgacgctgtgaaccagataaaagcatggtattgagagaggcatgacaagagactaaaacatagaaacattgttgctttttaatataaatagttctgttcacaggtcgttgtcttcacaaagcattactcaaatcaacttaataatagttttagtagaattctagtcattcagctttaacatcaaggatatttgtctcaaatggagtgtcttgagttgaaattaaggtaagttttaaaaaccagagacttttctgagttagctatcatggtttttaaagtcaatgtctaaaaggtggtcattgcacattatattccaggttggctgaactaaatgtggtacccaagggaagcatcacctctctgttctgtaccatgctaatcatgctgcaacatgatgtgctgaacgtttttaacgttctcttttgagtgtttttgccttcttttccatttacacacaggtagaaattgtctaaatctttcccattttgttattcattatattttattaagtctactggaaataaatatatgccgttattatcccaacaagaagaaaatcctgttccacatcttgacagttgcttcaatatctaatgcagaaggagatggaagctgagcaaacgcttaacctcatgttctgagcaatgtgtatatgtgtataatctgatccttgtttcacaaccaaacataaaaataaatcacctttaagaaagaaaaaaatgacatattgtggtcagtgctaggaatatggaacttcatctgtttccactgattgcattgtttaagctgtctgtaagaaatctctgcccccaggaaatcctcaaagcatagaggaaattgtactagaaaaatccattacattgacccctgctggggggttgactcaagtggcaaaaaatgatggtaaaatattaagtgtcttaatattatgctccatacagtcactgcctcttattagataacaaggcaaattttcaaatacatcgctctgaatttctagaagcctgtttaggatggacacaaggttgaagacaaacccagtgtgtgcaatcaaggaggatggaaacataagaaggaaatgaatgaatgacctggactgagagctctttgtagtcaggaaagagaagcattacgagagttgactacatgctagctactgtgtcaaactctttgcattcatttcatagaatcttcactttaaccagggcgccaaggcaaggagaggctaaacaacttgcctgaggtcacatagctggtaagaaatagagttgcccaatctgctgagtctgttactgtgaccaaacaggctatccatagttttgtgatggcatttatttaactgattttatgcaatacctaagagtaaccacaacaggcagacaaatgtttaggtaatattctctgatagcaacaaaaaagtcaatgaagttttctacttattatatctgctgaaatgtgggcattgagtatcaaggtttacctgccaaagatgtcactaagcatgtaataggaaaacttccgcagttcagcaaagcagcaagtgaaaatggtcaaattagtaaaagtggttcatttcagatgtattatgctggaaagtcaaaagtgccagaatatccttaatggactccaccagtttgaatatttcaataacatctgcaggtcactattgtatttcaaattttatttattttcaagtagttcatgctatagcaatcaaaatacccttattaattccaggttagtttaccactaatttgcattatttttccttattctatttgatttttcctaattaagaatactaatagtttataggtagcttttcatatttactccattgcgtcgtttaatatgatgttatagtttcagctagatcctcgtctatgtctaccaggtaaaacaaacaaaatcaaaagaggaaaaatatgcctggctatgtgattattttcattagcagtgaatctgtctgtttctgtgtgattgagatgcaatccgtccctgctgcacctctcatttactcccaggaaacagtcccagttgtctaaaaagtcaacaccttctgacaggcaccatctggccagccgttcattaactccccaatgctgctcatgaatttgcctctctacgcgtgaccagtgacaccgttgagagctaatgtggcttaaaggaatattgtttccctgtttggatcacccaggcatcacccagcatgagtcctatgggcaacatcctacctgggatgtaagtttgttataagattaaatgtaatacttgataacattttggaaatttgaagctgagggctgtaaagagcaaaaaaataaataggtcataaattttgaaagtttttttgtttggtttgaagatagaagacacttcagaaaattcttttgtgggagtaaattttttgaggagtgactaacaagggagtgatgagatagattcatttattgtgttgcatctgaaaatccttctgctttcttgctatatgatttacctttattttccagtttcttttgcttttaatcctatactcagaggtcacatagtctagcaggagagataatgtgaagataatgcaagagtttgaggaaaatcttctgctatttttctttatgtaaccctagtctaccacttctgaatatttcttaattttggttttatcatttgacaatgtaaaaatgcctcaaacctgctctaccagttacacctggtttctaaaaggcgccatttctaggcatatcaaataaggtaatgaatgtgaaaaaagctttgtaaaacatagctgctggctcactgggtatctgttttggcttatacaatatcacagatgtagagattccaaaataaaaggtactaaactcgctctcaaggagcttacaatccagcggagagatggacacaaaagcaaacaaacaaatcatgtgatgcaacattaggattcctaaaatcaaggtctaaagagcagagataatgctggaggagccctacaaaggaggctgggacattttgggcagaggaaatgtggaaaaaagagagaggtgagagacagtatggtacttttgaaacccttaagtagtcaaaacgggataaaaatgttggtagaagaaatggtgagacctgacacataagaagcatctggtttgcgaacagctttgtttgctgtgtaaagctgttgaattgtaccctgtgggcaatgggagggtgttgcagagttttgaacagaatgagatgattggaaatgccttgaaagaagggaaggttgaaggaatgatgagaggggcctaagcccaggtgtcagaggcacagtaaggagtcattagcagtagtacctgtgagagatgaggaactagaatagtgacagggaaggtcaagaggagaggaagcatcagagaaattgagtgtggaatagcaaggcttgtgggctgcagaattaaattaatccaaagatcctttatcagataaatgttccattttctctgaggcctgagtttttcaggtccatttttttttcttccttctagtattcttagaggggagattttcttacttgttctgtaaaagttatttgacccatgtgtgcatcttggaaagattcttttgacattctctgatgccaagaactttgccaataacatttctagagtaatttcttttccaaactctgagctctatgacagcaggaatcagacctgtcctgccccctggtatattcccagcacagtatctgcaatataatagatccttaataactatttgttgaatgccttgatgataaactctgcagtactttgcaaacaagatgccctgagaagtcagaagaatagatatgtctttataataaagtttaaaagttgcctcattgtaagcaggcttaataacggtaatattaataataacaaaacatttgttcaatcctttgataattttcacacactatgataaatgtactttgtgttcttcatctaatttaacccttacagcaaccctttgtgggcactgctttatttcaattttgtagatggggaaaatgaaccttaggggttactcatgaagtgggtggcaaagccatagttttaatcctgagtttcttaggggcaaaactccagactttaaaccactatgcctaatttaatgacctcttaaacaatgtgaattctgtcaaaaaatgacaattaaaataggtttcatccattctgttttccctactcttcgatgtctttcatcccgggattgttctgtgttgtttcttaatacatatgcttacattttataggcacagatgctatcttccctccccttttctgatttctcctctcctcccactctaaataatgacatacagtcatggtgtggacattaatgtgaaccgtggttagattatggctctacatccagtggagtgctggtcttacgcatttcctcactccagtctgtatctcgggtggagtctgaggctccatatccacttcctactccatctctctagctccacacctggaatggcacctccaccattcctacagcttggtggccaaatgtgtgagtgtgagtagcatttatgggtaagtcaatttgcaataggtactagtagtgagagcaacaggcatgtaagagaggctcatggatggtagagtttggatattatttatcttccctactgggtcacctagtccactgcctggcaccctgaggcacttgataaacatttgctgattgaattaagtatgtatgtatgtgagccatctgacacaaaaacccactgtctcctttattttctgtgcaatggactgagctctattttttaaatacgtatttttaacacagtattgagtatcagtacattcaacacagactcaaaagaatcttttcctttatccttttgtgatttttctcctttcttgtgaatgtattcatagctgggtacgattacaagaaaaacgattacctatagtagtgtggatatgaatgtttgcttgcctttttggtctcagatgaagagctgtacatatcatcacaaactatctttttccttaagtatgtctctcttttaaaggctaatattgcaatatatattactttaattgcagattttgtaatatgctccatgttttacaaatactgtggctagtcttaaagaaaaactttgtacaataacttgcactctgaattcaagagtttctcttatttgtgatatcaattccctttgtgccttggacttttttttttttttttttttccatttcacctccattgaaaacatctgctaaggacttatttaaacagctagttaatgctttataaagctcagaggcgcgcccatctgttccaggagcattctcttttctcaagagctatatcatattttctacctgtctgacagctggttttgcctcaaaactcttaatttctctttatatcagtagcatgacaccttactttaaagtttataactgatttttcttcatcttgcttcactctgagcaaacctaaaagcaagggagttatttccttccttttttcttagtcttacttatatcttccaattttgtttttgtttttagagccagaatgcctttcctttgaatctgcataatcaaacagaagtcaggatgtagttctgatggatttcatctccagcattgtggtccttgggcccctccgcattccaccctggtgtacaggacccaatggcaagccgctttagctcctatctggtccatggggataggttacataccctttgctagagagtgaagatgaatcccaatgtcatttggatcctgctttcatgggatgattcagctttctcaggctgagtcaggaaccagtcctctgtatcctccaactgcccatttctagatcttcaaatggtccagtctaggctcgaggtgacagaggatgctctctcttccaccccacccctttctgaatgggcagactcaaggcatagcaactgtcgtctgcagaagaatctttttactattgcttcttgtctcctctatgtccattcttttgtattttcaaagtaagtgagaggcttcaggagttacggaacaaacccttttgtaactctgcatttaaggatctgtttcatattttttatgatatctgttaatatattggcaccttaatcgagagcaagatacgatgaggcctaatttaacatccggttacactttcctcattgcgtaatgtggctatatcgacagcaattcagatgtagtaatttgtgttttacccttattatagtaaatcagatggcatcttgcagctatttactctttacatacatgaagattaactcaccccaggggttatttttttccgatgtaagaatcttaatttccttaacttttcccacaggtgtcacatgccattcttctgattttcatgaatatcctctaaaaggcagctaagcactcgctgtcttcttccttttgcctcatcaagcacgggggacgctggaaggaagaggtacctcatacattttacactgacttaaatcttagagaagtttatcttgcgttgaaactggggatttgaaaagaggcttgcttacctgacttaggtttgtctgaaaacgctagttatgtcccttgtgtctcaaaaaccaaccaacgttttccagttggtcctaccgaagaaaatactgtctgttccagtgagtcaaatacaagaccatctgtgccagtccgttaaaaaaaaaataatccaattgctgttaatagatgaccgtttcgaagggcaagtccaaaggataaaaaaaaaggtgtgtagttattttgtattgatgtaggcatggctatttttgtttatcacaaggaggaaaagactactccctgtaccattctgtatgtatgtatgtacacagtggaagccatatttctcatacatcagtgtgccaagaaagctagtcaacaagcaagggctaagaacagaactgggaggttatcctgacactctccctatacttgggagattcttgttgagtggattgggaattttaaagttgttcctgcttctgctgatccatgcaattttaggcaggtgtttctctgtggtccaggtatttcagctgtgaagtgagtggtaacaacaggattattggatagtttgttaatgaaatggagtcattgctaagcaagatatatgcaggaaatacctgcaagtaagcttaaaagctggaagtgaagcaagtctgttttttttctttaaggggaggtcataaatggccgtcttcagggagtgttgtcaagaaggggctgcaagccatctgaagctctagggcatctgcaaagtttttctctccctttcacaaattcctttgaagaagctttgtggcagtgccaagggcatttactttcctgcagagcagatgggggaagacaagagcagaatgaactttctcatgttttccagtgagagtcaagtatttccatcctcttccttgcacttgaagtcatcatttctcataaaagatttttataataccaaaggcgaggcacaaaaccaataatcctggtgcatcaagaatatgtattacatgactactcccctaactatgagaatcattaaggcttttccgatgagataatgtggatagtctcctgtcagtgtaacgactttgccgcatcttctttatctagccacatccccagtttcagagtttagggaaacccaccttctattctcagctccactatccagagtgatcacctggataggtgatcacttctaacaccttcttacattctaacatggaccatactctcatcatcaattacttggcactcaatcctgtgccggtttgtgttaggtttgctagttttcttaccattttacattgtattgaatatgcactgtacctttatgacacttctatagagatttattcttctggttaaactgaaggtctgttatctatggtgatttagtcctgtacttgactctaaaccttggaccagtcacacataccattgaggttcttgagttgtttctgtagcatcccctgacaatcattatcatttatattaaaaagcaaaacatgattgctgaaaaggaggacctggtatgcaccaagcataccagtgctgaagacgcacttactggaaccctatttgaacatgggtcatgaatggactgcaatatggcaccttgatagccatggtttgatgacttgacataactgcaaacagcaacattaaaaaggacacctggagtacaccttaaaataacaaaatataaaactgttgaatgttcaaaatgaacaaagacattcttgttgtgaaatatccaattagaaaccgtgaagatatgtctaaaaactaggtcagtggggcatggtgtctcatgcttgtaatctcagcactttaagagggtgaggtgggaggattgcatgaagtcaagagttggagaccagcctgggcaacagtgagacccaatctctacaaaaataaaaataaaaatatattaactgagcatggtggcatgcacttgtagtctcagctacttgggaggctaaaggaggaggatcagttgagcccaggaattcaaggtttcaataagctatgatcaccccactgcactccagcctgggtgacagagtgagaccctgtctttaaaaaaataaaagagatccaaaaaaattccagaataaaccacttccacttgttcaaattgaaacaaatttatttgtgcacaatgtgtaaataaaagccagttatacattatcacttaataccacatatatatgcaaagtcattagtataataaaaaaattgtgtgcttatataacacctattatccattgtcctctgaggataagtcattagtgtaataaaaaaaattgtgtgcttatatagcacctattatccattgtctgaggattaaaaaagtctgttttggcctctatccttctcaatttgacatttggttcacttaaatatcttcataagagatttttataatatcgaaaacaaggcagaaaatgaatattcattatgtatcaagatggtgttaggcactatgctatataatttcaattttcacgttatcgtcacaacagtggtctgagattagatatagttacctccatttactttcagaagagaaaagcaaagctctgtggggttaaataaattgtctatggctagctacccttggggaatactggaaccagggtgcaataccaggtgtgtaaaccccaagatccattaaatcccattacaccaacaaaaacacgttgaggaaatcacaagttctcaggatgccatacttaataaagacatttttttggccgggcgcggtggctcacatctgtaatcccagctctttgggaggccaaggcaggcagtggatcacctgaggtcaggagtttgaagccagcctggccaacatggtaaaaccccgtctctaccaaacatacaaaagttaactggacgtggtggcacatgcctgtaattccagctactagggaggctgaggctggagaatccctcaaacctgagaggcagaggttgcagtgagccaagattgagccactgcactccaccctgggcgatagagcaagaccctatctcaaaaaaaaaaaaaagaggcttttttttttttttaaaatactttaagttctagggtacatgtgcacaacgtgcaggtttgttacataggtatacatgtgccatgttgatttgctgcacccattaactcatcatttacattaggtatttctcttaatgctatccctccccactccccccaccccatgacaggccctggtgtgtgatgttccctacccggtgtccaagtgttctcattgttcaattcccacctatgtgtgagaacatgcggtgtttggttttctgtccttgtgatagtttgctcagactgatgatttccagcttcatccatgtccctacgaaggacatgaactcatccttttttatggctgcatagtattccatggtgtatatgtgccacattttcttaatccagtctatcattgatggacatttgggttggttccaagtctttgctattgtgaatagtgctgcaataaacatacatgttcatgtgtttgtatagtagcatgacttacaatcctatgggtatgtacccagtaatgggatggctgggtcaaatggtatttgtagttctagatccttgaggaatcgccacactgtcttccacaatggttgaactagtttacactgccaccaacagtgtaaaagcattcctatttgtccacatcctctccagtatctgttgtttcctgactttttaatgttcaccattctaactggtgtgagatggtatctcattgtggttttgatttgcatttctctgatgaccagtgatgatgagcacttttccatgtgtctgttggctgcataaatgtcttcttttcagaagtgtctgttcatatcctttgcccactttttgatggggttgtttttttcttgtaaatttgtttaagttctttgtggattctggatattagccctttgtcagacgggtagattgcaaaaattttctcccattgtgtaggttgcctgttcactctgatggtagtttcttttgctgtgcagaagctctttagtttaattagatcccatttgtctattttggcttttgttgccattgcttttggtgtttttgttatgaagtctttgcccatgcctatgtcctgaatggtattgcctaggttttcttctagggtttttatggttttaggtctaacatttaagtctttaatccatatcgaattaatttttgtataaggtgtaaggaagggatccagtttcagctttctacatatggctagccagtttccccagcaccatttattaaatagggaatcctttccccattgcttgtttttgtcaggtttgtcaaagatcagatggttgtagatgtgtggtgttatttctgaggcctctgttctgttccattggtctatctctctgttttggtaccagtaccatgctgttttggttactgtagccttgtagtatagtttgaagtcaggtattgtgatgcctccagctttgttcttttggcttaggattgtcttggcaatgcaggctcttttttggttccatatgaactttaaagtagttttttccatttctgtgaagaaagtcattggtagcttgatggggatggcattgaatctataaattaccttgggcagtatggccattttcatgatattgattctttttatccatgagcatggaatgttcttctgtttgtttgtgtcctcttttatttcattgagcagtggtttgtagttctccttgaagaggtccttcacatcccttgtaagttggattcctaggtattttattctctttgaagcaattgtgaatgggagttcactcatgatttggctgtctgttattggtgtataggaatgcttgtgatttttgcacattgattttgtatcctgagactttgctaaagttgcttatcagcttaaggagattttggactaagacaatggggttttctaaatatacaatcatgtcatctgcaaacagggataatttgacttcctcttttcctaattgaataccctttatttctttctcttgcctgattgccctggccagaacttccaatactatgttgaataggagtggtgagagaaggcatccctgtcttgtgccagtttttaaagggaatgcttccagtttttgcccattcagtatgatattggctgtgggtttgtcataaatagctcttattattttgagatatgttccatcaatacctaatttattgagagtttttagcatgaagggttgttgaattttgtcaaaggcctaaaaaaggcatttttaatgtgcaacatgttctttaatagaaacagtaaccttcagttaaataaagaaattgatgtgccaataacagattaatttttcatgcccatattgacactgttctgatatttcataccctgcctacccacttttctttgccctgcccaggctccagggacctacctgacttcctattcatgctgatcccactgagacccttatcaaccctgacctgttccccatgtgcctcttggatctgccttatgttccaggtatagttctttttttttttttttttgagatggagcctcgcactgtcacctgggctggagtgcaatggtgcaatctcggctcacagcaacctccgcctcccgggttcaagcgattatcctgcctcagcctcctgagtagctgggattacaagtgcacaccaccatacctggctaatttttttgtatttttaatagagacagggtttcactatgttggccagactggtctcgaacttctgacctcgtgtgcccgcctcggcctcccaaagtgctgggattacatatgtgagccaccgcgcctggccttaaggtatggttctttaacacagaatagatgcattctctgtagctaggcatggtggccagcgcctgtagtcccagctattcaagaggctgaaacatgagaatcccttgaacccaggaggtggaggttgtggtgagcggagatcgcgccactgcactccaacctgggtgacagcaagactccatctcaaaaataaaagatttattctctgaagaaactgaacaggagaggaggttacagactcagagaaaccaggcgccactgtaggtgagggtgaggcagttgtgttgaaaatggacttgaatgaaagcctgcataatgatgagtaggaaacaaggcacagggcgcagtactcagatcgactctgtgcttgacttaatgctctcctctgccatcttgaaattctgaataattttatctttgaacttgtgttttataagtgaagtttgatgggatgacgaagcatgaatgtgagcagaggagatatgcataatacatgtgtccactgttccttgctgccctatttaaatatagtgtttctgatgtcccatgagcacagaacttcagtggacccaggatgtatggtaggttagcaagcctcaaagtgagtgcaaagcaagatgttgagtctgtgagtgagtatgctgctgctgacaggcctgagaagccacactgcctgttccaataacgattttcaaaggcaggaacaaggcaatgcattctaagaatgatgacctccgaggaaccccatcatgtcctttctactcctgttactttcttgtattagccaaactacctacagtaaaaatgatgacatggaatgggacaggtagtaagactcagagtttcttttctgtcctaatttattcttcagtaaggaatgtagagtgttagtagaatatgtatctattaagaagtgagataaaaataggctggccacagtggctcactcctgtaatcccagcattttgggaggccaaggtgggtggatcacatgaggccgggagtttgagaccagcgtggtcaatatggtgaaaccctgtctgctaaaaattacaaaaattagccaggcatggtggcacacacctgtgctcgcagctacttgggaggctgaggcatgagaatcgctcgaacccaggaggtgaaggttgcagtgagccgagatcatgccactgcactccagcctgagccacagagtgagattctgtctttaaaaaaaggaaatgaaagtaagataaaaatgattgagtttttacttatttattttttttgtgcagcatttccatttttctggtaagaatgaaacttatattcaagtacacactatgaaacacaaattgtgtaatttcagtcgtcctgtttaagtgttaaatgtgcttatatttgcatttaaaactggcattgcacaacataaagatgaacactgaaaaattcatgctaattatttaaatttttaatctttttaaacttagaataactttaaatagtaaaaacaaaacactatgacaattcaagaaagagactgcagaagaaaagaaaaagttttatattttagtaacattagtgccatttcccctgcttttggaacaaggggtccacatttccattttgtactgggccttgcaatgtatgtagctggccctggtaggatgccttgcttctctctcttgagaaggtcaggggccaggcttataccccagtgagaaagagtggtggattctattctggaggcattaaacagccccagaaaaaacaaaaacaaacaaaaaaaacttccatgaacttaggagttcaccaagaagcagtagactttccccattcaatctagagagaatccagggcatgtgcccgcccatgtgcacgggatttctcattggttttaggccatcactctatgaatgtcttgtagttctcagatggctaataacttgcaaatatcagagaaaatctttcaaatggaaagagagccaccagataaacatcaaatccccaaggaaaaaagggggcatgaagagattatctgatatgatacagcatctggaaaaagacacagaaattatcagaaattattgtacaatcaaacatttgggaaaatatcaacgactggtatacagaaaactaccagcaactctaaaaaggtgagacaaaaattgatggcacaaaaagaagataatcagaatgcactacatgcctttatataaaccttataatgtggacataatatgttggtttaaataaagtggttatgtaactgtatttggaggattgggtgaaagaaagtagagaagggatagagaggctaaatcctcatctaacctttagaggaagtcattattaatgtctaatattggtgaatcaacgactagtagtgtaagcatgttattttggaacatggagataaattccaggagaaatagataaagaagttaaaagtgcctagggagcatggttggaggatgagaggaactaacagcagaagcaggggatagttgcttttcctcctaactcttttacttctacttgatttgtcaactccatacatgtgttgtactgataaacatttatagtaaaagaaaataaaaagaaaaactactgattatctcacagaatttccaggaagcctggataaccatgcttggtagttgggcaggagcaaatgaagtgtcctgatgaggacaatactgctaccctagctggcactgcctgtgccactgcagtggtcactggatgttaatggcggcgcacattctccaccatctctgtgtcttttcatcatggccaccaggttaaatgtcttgggtggtagcatctgattggctgaggttaggtcatatgtccatgaaccttggccagtttggcagaggtcacagaaaagtggccttttaggcttctaaaggggagatgagctctgccttctgtaaaaattcatatagtagaagctgccttgattttaggaaggggattcagacactgggcagctgaaaataacatcaaatgcacactagggtcactttctggtgaaagtgcagatcacttgtgaaaatttgatttttttctcttctgtcaggcactttttgggggaatttaaagcttttgaggactggaatatagcagagggtacatgattctctctctctctctctctttctttctctctccatctattacctttctatccaatctgtttaacattaagtccaaggagtgtaattaataaaacaatgatatgacacagcagatactctggaaaagggtgtgtgtgtgtccaatgtagtgatcagaaacacaacttcccaaggaaaccagaaactctctacaaagcaaaaattcaccagcaagcaagccagcaagcaagcaagcaagcaagcagaccacagtacccacaggagaaaaggatataattctcccctcccagaaaaatgccctgttctgttttccccttcattaagactctgacgagtgaacagcacccttctgaataatttcaggaactaacgttcactacagagaacttcaggttgcatcagggaacatatatacacagcagtcaactcaagaagatctgtcatttcttcaaccagcacacagttgggggcttcatgaaaaaggacaattttaacttttatatgcttttcattgatttggtgtattaaacatgatttcctatttacttttattctggtgatttggggctttcaattagagactaggcaagctgacagacacatttgttgcatattttatgtattcccaaaaggtttgccattgtgaagagccaggttttggggagcaaagaaataaacatgctagtgaagtcagctttccacaaaaacaacctgagggacgtgcttcagtggctagccctgattgtttgagacaatgaatgggtattacatattcttaagtatttacagcatatatgtatatatgcaaatgcacacaggcaatattttgaatttgagcaggtaaaaaattttcatctctctagctcttactgattctctaagctgctacatttgttttgctgtagaattttcaataaacacgtcagagaatactcttccacctggattcaaagtaatttgcatttcctctagtgtgaaaccaattcaccgcaggtataggcctaagaaattataaatatcagatataatttttgtaattgcacttcttgtctgaaagtggtattcacagaaaatgtaactttaggtgagcacagcaagagtgtgtgtttgccagcaaaagaaacttatcatcagagtgaacgggcaacctacagaatgggagaaaatttttgcaatctatccatctgacaaagggctaatatcccgaatctacaaagaacttaaacaaatttacaagaaaataacaaccgcatcaaaaagtgggcgaagtatatgaaaagacacttttcaaaagaagacatttatgcggccaacaaacatgaaaaaaagctcatcatcactggtcattagagaaatgcaaatcaaaaaccacaatgagataccatctcatgccagttagaatggccatcattaaaaagtcaggaaacaacagatactggagaggatgtgtagaaataggaatgcttttacactgttggtgggagtgtaaattagttcaaccattgtggaagacagtgtggtgattcctcaaggatctagaaccagaaatatcatttgacccaataatcccattactgagtatatacccaaaggattataaatcattctactataaagacacatgcacatgtatgtttattgcagcactattcacaatagcaaagacttggaaccaacccaaatgcccatcaatgttagactggataaagaaaatgtggtacatatacacatggaatactatgcagccataaaaaagaatgagttcatgtcctttgcagagacatggatgaagctggaaatcatcattctcagcaaactaaccaggaacagaaaaccaaacaccgcatgttctcactcataagtgggagttgaacaatgagaacatatgggcacagggaggggaacagcacacaccggggcctgtcaggggttgggggcaaggggagggatagcattaggagaaatacctaatgtagatgatgagttgatgggtgcagcaaaccaccatggcacgtgtatacctatgtaacaaacctgcacattctgcacatgcatcccagaacttaaagtataataaaaaaagagtgtgtctttgcatgaggaacaacaccattgcagtatttgaagatggtgaactctgatcaggttaaaaaatcagcctaatctctacatttaatgaagttgatgaagagaaaaagtcattaattcaattttttaaagaaatattttcatgctggtcagagaggaaaagaagacataaacaggtggccatgatatttgggaaaaagaagcactgattttaaactgcaatttggaatgaagagcagaatgttgatactagcagcgtctggcaggcagcttagtggcatatttagcctttctagaatcaggcttcataccaacctgctgaggtttatttccataattgaaaatctgatggagatgtgggaagtagtatgtacatggttataaccctaagctggccccagacagttcttgaccatccactacattagagtcctgtactgtcttcaggtggtttggggctgaagtagaggttcatgtatgggaagaaagacaggaagatgcattattaatttgaaagaagtaagaggtacttcttacctataaacaatttaaatagaagcttactgggaaggaaagctcctaataaatcaagtaatcctattggctctactgctacttgaatcttaatctgcttacgttatgtactttggtctaaattctattccatgggtctatacagaaaaatctaatctttcctccccatgacagacctatacacttttttttttttttttttttagagacagggtcttgctctgtccctcaaactggcgtgcagcccatacacttttgaagacagacaactatgttgtgttctgcaatcatttgttttgaagagtaggctgggcacggtggttcacacctgtaatcccagcactttgggaggccaaggccagtggatcacctgaggtcaggagttcgagaccagcctggccaacatggtgaaaaccccacctctactaaaaatacagaaattagctgggcatggtagggggtgcctgtaatcccagctactcaggaggctgaggcaggagaatcacttgaacccaggaggcggaggttgcacgtgagccaagatcacaccattgcactccagcctgggccacaagagcgaaactctgtcgtaaaaaaacaaacaaacaaaaaaacagtatatatcctcatttccttcctcatgatggaattttcatgtttcatcagcctgttagtcttctctgaatgtattcatgtatcaaatatttattatatattaactgtatcccaggcatgcctagagctacagtacagaaataagtaagatatattcccttctataaaagaattttggggctagtaagtgagacaaataaaaaaagtatataccatgatgaagtgctataatagagctatgcctagagtattatgagagggtcacttgtctttgttgggcagaaataagcaaaagtttcaggtagggtttgactggcacagagcacagaggatctcctatactgtagaatttaaaaaatctcatctgtaactatacctatgtgcccctttttatacctgatgttatttatgactttgatgtcttttttatatcatatttctcaaaactgcctattttattgcttctttttaattaatatccatttttattcttagtttccttctacttttaaaaaattttacttttttttctagatttttgagtattaatcttcattcttcttgatctctagtagattcttttgagtctatgtatttcctctgggtactgctgtggccacactccagaggattgggtgtatgacgttacgtggctgcttaattataaagaatttgtaaagttaggtttgagtagctccaggattctccgaatgactctccttggatcctgtgatgcaatatacccttcaccagatcccaatgttcctgctaaggttcctgctaagaggacacatggggtaatcacccctgcagagggttctcctcctttcagcatccccttgacctcaacagccattttcaaaggagcggcaccatcctctttaattagggccagcaatgaggggagctggcaaatgggtatgtttttcttagctatgttgccaacatgagaaatttcagttgtggagaaagacccccttgccagcacaactagttaagacaagaatatgattgcatctagatttcatcagaatacgatgaggtgcatcattaagccaggcagagggaggcggacttgcgtaaatctactctcctactcattcaaagcagtaaattgcagagtgtgcacaggtgatccccataaagctatgtttcaggcggatgcctgctgggctggcacttaagcaaatcccttaacccatttgttactctgtctctgtttcctttccttcttaaaagcactttcttttatcaaccttccttcaggggatagtggtttcaggctctccttatcctctcctctgtgaaaatttacccttaagaaaagatctagagacttcaacatatataaatgactgataatatagtgcctcacccaggccaacactcattttaaagggaacacaaagcctgcattgaaggaaatcagtgtgtatgtctagaattttcatcagtagtagtatgaagggctatttgggggcagtaggagatgcggactccagtactgatcgatgggggcttggctagtacctgaaatgattgacgagggctgcatgtatgcagagctggagttctcaacctggggaaatttgtctccaactcccaaaaagagaacatttggcaatgcctggagatattttggaacaactaggggtggggggtgctactggtatctagtgggcagagaccaggaatgctgctaaacatcctgcaatgtacaggacagtcccccacagcaaagaataggccggccccaaatgccaacggtgctgaggctgagagaccctggtgtagaatgatagatatttgacaaacaacactggcccccatgttggaaagacagcagggagagcttttgtgggccagctggagaccaccttctctgattcgaggcactctcactgcccaggacatagagggattatcccacggtgtagtacagccagatcttctgacttctttggagaattcaaaaatccagatttttatgtgacatctctagatgttaaaacaccagcaatgaatccaaatgaacaaagttgagagagccacacacacttggccaagggctggacttagcttgctggcagctgacatgacaagttgtgaccagatcgtcctggcccatcaaggtgactgtgggttataaatccagggctacaagctaccaaggcaaggttctggtggtcagtctttctgtctgcaaagaccaggactgtcccactgaggcacaagccaaggagaggtctgttttagctgtgtggaaaataaaaagtatagattgctcttaaaactgtgctagcactatttaacagagtttaccaatgcaattttagcttttcctcttgtaaaaatttctttcttgggctcaataggcacatttcagattctggagttttctcttactaattccagtatctaccagacagggttggttgttgaagagatcaaataagataatatatgtgaaagttcatagtgtagagttgtctgctgtgaaaagaagtgttagttgactctgaatacaaagataaaactccactctctgaatgggaccgtaggcattttcttgaactggatagactcagtggccggctcctgggataatgagctgagttcacttgcttgaatttggagggtaaacacatgttctttgtgtctgggaggtatgcttgggatttcctttgtctctccctgctttggggaaaagcaaatttggcatggcctttgaatgcttgcctcccccacacttttttttttttttttcagtatggaagctttgtaaattttccttgttaaaaacaagcaccatcttcatacctgctgaaatctaattctcatccagagggatgtgaggaataaagggggcagtgataccaacagcgggcgtagacagcccatccatcccacgcaggtacgctggcgtggctacatcgacccgggagggaggccgtttgtaaagaaccctttttattgtgactctcgcctccctcagctcatcccgagccatgagaagagcgttgtcaatgagacaggccaattttacccatcttacacaatagtgcattacagactttccaagaagacaccattcagggtgaatcaccaaattcaggatgaaaaggttttgatttgcaaaagcgctcaagcatttctctttagagctggagatggcagggaaggaaccgacgtgcatgcagctgcatcacctttgggccaggtgtgctggcaagctctccacgctagagcagggcaaaggcacctagcattcacaggcgcctttgtcccaccgtgggtgctgggactcgtgaatgccctattgaaggcagaaaagaataagaaggtgccagtgatggtggggtattgaagtgagaggaatcgagtcaaagcatgaactgcatgcaggttaacagcaactgaaattaatgttaaaatttttaggtccttaaatagattcatcaacacaggtaggagatgatgagagaaaatactagattaagagagttgtgtcatttaggatgatttcagctactagtcactgaatatctatctaaagtgaattaaacccttcttactcagagttcaggctcagaactggcagtgtcaccttcacctgggagcttgtcagaactgcagaatccctagacccagcccagggcctcctataatacatcagaatctgcattttaatcagacacacaagttatttgaagtcacattaccatttgagaaacaaccatgaaaaaggactattttaaatctcagataacaagtagacaagttaactaatcagagtcagttaactcagcaactcaacaatgtcaagaagggcctgggtgttttccatttttctgctttgctgtgtttgatgtctttacttccatattcaggtttatggtcctgtgatcacaagatggctgcagaagctctgagcatcacctcatatagctcaacaaaggggtaggaaaaaggagcttcctctcaaatatgcatttttaacagcaaaccaatcctaaaccagccattggcaaggggattaaaataatgctgatttgctaaggccaacaaacctttaacccctgggaccaggtggggcttggcctcctttgaagctcgtggcaattaaatatatgaacaaaatggacttctgtaacttgaaagaaataggaatgaggagggaagttagctggtaggaaaagcagcactgtgtggtgcaggaatttttttgaggctggtttcatatattttgggacatcaggagtttcctctagaatatttgttagagagttaacaaagatatcagcttttgatttgattctatgatgactgaccctagggctattatcctaggacatacatagatgggtagtttgtgttacaggaaattctttttttttttttttgtagacggagtttcactcttgtcgtctaggctggagtgcagtggcgtgatctcggctgactgcaacctctgcctcctgggttcaagtgattctcttgcctcagcctcccgagtagctgggattacaggcacctgcccccacgcccagctaattttcgtctttttagtagagatggggtttcaccatgttggccaggctggtctccaactcctgacctcaggtgatccacctgcctgggcctcccaaagtgctgggattacaggctggagccactgcgcccagcctggaaattcttaatgatagaataatgcagttacataatgttcgaatgagaaggctagaagggactttttacactacttagaatggtgcccttattctgtagatgagggagaagtccaggtgatttatgcactggttagctgtgttgggattggaatgtattgccctttcatatgctaccatcttgatgggaggtagttcaaccttttcaatttgaaatctgtatttcgaagacctacataatgttacctctctgggaaacatgaataattatgtagagcaaatcacacacaggtcattttaaggccatctaagagaaataggattctgttaaacaggtcataggatcccagatgcccctgaatcatgagacctagaaagctagagagtaaggctatgcttgacgcagtctgtaggcacttggcaagtgtttgcagagtaattactggactggataaataaattaagtataaatacgtctttttcaaaagagaattctcatgcgactcaccttcactgttgacattcctatatggtgtatgttgtttttaattgaattattctgaataagtggggtaggaccaatggattccagagtatgtattttctctttcatactcttatttctaagggtctaaaagaagaaaaacaaatacaatgttagactgcattaaagaatgtacaatagtccccccaccccttatccacaggggatatacttcgagaccctcagtggatgcctgaaactgcagatagcaccgaacccgatggccatcaatcggaacgtgtttctgttcatgtcttccacccacacatttaatgccttttcatcttaattaagctcttatgcactgtggccataactttcgcagtttgaggtgcaaccacagaactagtataaagttctttttccttcttcacaatttcatggataaacgatttttatcgtagactttagcaacctcagtatatatattttttcttattaagttgagaactttcatcttttcacttaaaggatgcactttacttttctttggcatagccagattgccagcatcactactctcatactttggggccattactaagtaaaatgtgggttagttgaacacaagcactgtgaaatggcgacagccgatctgctcatcgagatggtttctatgtgattcatgggcagggagtgcatacagtgtggatatgctggacaaagagatgattcacgtcccaagcaggatggagcaggatggtgtaagatttcatcacactactcagaacggtgtgcaatttaacacttatgaattttttatttctggaattttccatttaatatttccagatgacagttgggccagggtaactgaaactgcagaaggcaaaaccatggatggtgcagggggctgtgggggtggtgggggactgtggggggagtggcaggactactgtatcatgtttagggtcaagggagacagtcttcacggtaccctttgggctgattctgactactttagaattgtttttttatcagtttctagcaatataatttaaggaggacattgattaagtgttcactgatgacaatgatgataaaaatattagagccaaatatcagccactttaaatttttttcattaaatcttacaaaacccttgtgagatagacatctcaaagataaaaaaaaaacagaagctcagataaatgtattaacctaaggacagctactaaacagtggagctgagatttgaactcagggctgtctgacacctaaacaccatcaaagcagctaatgtagttaagcattagttaaattctaggcattgttctaagtgcattatttcattaaccctaacaaaaatcctttttctgaggattggaaatacctgttatttccttttacaggtaatgaagctgatgcttagagaggttgagtaatccacccatgtctctctgacccaggtctgaccaccatactattgcctgcagatgaagaggagcaacatattgtatcctgtgttgctcaagagagcagaattaggacttagaatagccttctaagaattgctctgtgccaccaaatgggtggcagacttctagacaagttttctaaacttgtcagcctcaactacaagtgagctggtgagagaaaacaaacatcactatccaggggcttttgctggacttactgaatgtaacagagatcggattggattgtctctaatgtctgtttcacgaatagagttctgtaaatagtctgtcttttctgaagccattgtattttcagtattaggtcatttagttgactgaaagtgtgtattctgtaaagagagaaagggatggggagagaaaggagactgttacttttattttcatgtcctttgctctcccacatgcatactccacctctagctcttacactcaaacatctacacttgcagcttactgtagatgccactgtccttttccacatttgcacaagtagatttctcactcccaacccttattttgaaaataaggtgtttctacatctttcattttatttttaaaaataaaagttggaccacagtttagatatattaatcacttttcccagaactcatgtttggtcatctaaaagcctgtgtctaaaagttgtgaggaatagttgaagctttcatcaatgtaaaggttgggtaatactctactgccaaaagtagttaattaatttctgcagagttaaggtagtagaaatgggagctctcatctgttttgagaaatgtgtacaaaattaatgttttcccagagaagcattttccaatgtctccatctaatttggctccattctgaagagaagcacaatgatgcttcagcaacttgaaattttactaagtgaactaactaatcctgcctttgaaacagtggactggggctcaaaagacaagcttcttagactaatactgggcactttctcttttctcactctctctttattcccttttctttctccttctcttgttccatcttttcactttggaaactattaggtttcaaaaatgcatctgtagctgtttattttacatgtgcctgattttatgagtttatgggctcctgaaaattaaattaattttaaatgagctttaattactaatgctttgggccattgcctttaacaaagtcaacataacaatcagggttaccttagtttgtctctttgaagaatgtagtcattcatttgggctcttattgagcagagcagctttctaactggaaaaacaaataaataaaataaaaccactgctatatttgaatgcctgaatttatttcttttccagaaatagccacctttgatttaagaaacaggattttaagtgtgcattaaaggattcattttgttaataatatcttgttatttttcagaagaggagaggatcctattcataatattatgctatgcaaatacagaggcagaggttgaatcatgacctgaaggtctgaattctgttcttagcttggtgcagagtgctttgtatgtaacattagtgaaatcggcttacttctcaatacagtgcccccttgcaaattaagggtaatcaactcctagttcaaaagtgaagggataatgagataatgttcaaaatggcttttaagtttctacctatagaggctgaaggtgaaaaaaagaacattgcaatgtctgtggatatcccccctcccaggagggaaggctactcatgttgttccccatggaatgttctcttcaatcaggggccatcacttgagtggtttgataataataagcttagattgactgcagataaaaatgggaaaggttgattaagtcatttagtcccttggcaattttgcaaaccaagtgattcttataagcatcagttttaaactgtgcaatacagggacccgacaaataaccaaagttcttgattccacatattgcaggatttcagctatttctccccaaaattaatatcaaatttccattatctaaatataccctgttgttatccgtgattcccaagtggtttctacctcttttatctctctcagttgaaaatgtgctaaaatacccaagtaatgaaaacacccatggttgccagttggttaattcttttaatcagttaaactgatggtatatagtatcacagaaatacaaatctttctaggcagaatattacatctacactcccgtcttcacttcatgtccaggcatattagactagaagataattagtatagaagacatattagtatagaaaagaaaaacagtgatttaaaataaaaaacttcaactataaacattctaagacaagttcagaaagaaaaaagtaattattttcttctagattctctctcaaatttacttcacacttatatttaaagcggctcccaatgataatgtttcagtcacaccgtatttctaaatgtgcaaagccaagtaatgtacaagtcattatttattaataagaataacatgttgcatttgtctaataccttacagtttccaaaatgcttaaacttactcttttttttttacgatatctgcttattttttctcaaaagatttttaaagtaagttatctatgtaattgcctcacctatagtggaagtcatctcttatttatttattacttattgagttcatgactattgaaaattttaaaagtagacgatgtctaagaatacctcagaagctgattccatgttatgtataaatattgccataagcagacacatgtatacatgcacacacacttacatacactcagcttcttctttgtcttggctggtattcctagaaagaaattacttttctttcaaattccccttgataactcacgttatatgtgatttctttcagcagtttgcttaccattgaggacttttctataaaggcaaagaacctggctagaagaaaattgagttataggaaggaaaaaaaaaatactttgaagaagaaaacttagttgggtacaagagggaaaagctaatggcatctttttttttttttttcttgagacggagtctcactttgttgccaggctggagtgctatgtggtgtgatctcagctcactgcaacctccatttcctgggttcaagcgattctcctggctcagccacctgagtatctgggattacaggtggctgccaccacaactggctaatttttgtatttttatagtagaggtggggtttcaccatgttggccaggctggtctcaaactcctgacctcaggtgatccacccgcctcggcctccctaagtgctgaaggattccaggcttgagccactgtacccggcccatctttttaaagttatatggccacttccaaaaactgtgctttcctctgttacatgtaatttaagttccatgtggattcttaacactttaaaataaaactatattttcttgttctgaataatgttatatagagatcaccattttaaaaaataaacaatgcctgataattggttttgtgaagtaagcaggagcagtgaaatcgaccataggggaacgtcagaaaggatgcaagcggggggcggggcggggggagctttacacagtgaaataaaggtgtttgattgggacacagacatgagcaccatttagacagtatgcttgtgatactaaatcaccaaactttattgatgaaggggcatcaagttcatctttaattttttgcccacacatcttagataattgtatacacaaaaggggtgtccagtaaagatttcttcaccagcatattttatcattgttgcacccctcactcctcattccagccacactggactttcaccacttccctaaaagttcaaggcttcttcctgcatgaaggcctcttcctgcatcaaggcctttgcaaatgttgaaacagtcaccagcaacagcactggcctagacgtggtaggtctgccacaaggatgaataatacagctggttctgcagatgtgaggtgtggcatactgaattttgtgctattggggccactgaagcgggacactaaaacatgctgtcaaagagagcacagagcaatgggatggcatagcatcaaggagggaatcttagaagtagccaggcagtaagaggaagaagaggaggcatcaaaggagacagagaagtggtcatcgaaataggagtatcagcttggagcagcatcttaggagacaaagagttgtaagaaagcatatactaccagtgctggaaggatactgtgctaactaagcacagtgcctgctactagaaagcacttcataggccccgtttcccttcattttctcacttatccttttattcattcaacaaatatgcctgtgtagctactgagtactaggtactaataagatggaagtgaacaagatagatattgttcctattctatcataaagcttacaatctggaggaaagggagtggggtgagaagagacaatgaaaaaattaaaattcacatataaaataatattgggtggcaaaaaatgctatgaagagaaacaagagcatagaaagatcagatggtgttacattgggtagggtagccaggagaaacctctctgataggggggatttatttatttatttacttatttatgtttttatggttttgttattttttaaaatatatttccataagttattggggtacaggtggaatttggttagagttcttcagtggtgatttgtgagattttggtgcacccatcaactgagcagtgtacattgcacccaccatatgcgtagtcttttatctctcccccctcccacttttccccccaagtccccgaagtccactgtgtcattcgtatgcctctgtgtcctcatagcttagctctcacataccagtgagaacatacgatgtttggttttccattcctgggttacctcacttataataatagtctccaatctcatccaggtcactgcaaatgctgttaattcaatcctttttatggctgtgtagtattgcattgtatatatacaccacagtttctttatccactcattgactgatgggcatttgggttggttccaggattttgcaattgtgacttgtgctgctataaacatgcatgtgcaagtgtcttcctcaaataatgacttatttccctctgggtagatacccagtaatgggattgctggatcaaatggtagttctatttttagttctttaaggaacctccacactgttttccatagtggctgtactagtttacattcccaccagcagtgtagaagtgctcctgatagggggatttaaatggagaacagaatgaagtgatgcatgtgatgttaggagttgtgatgatggattgatgatgatgatgattatgatcacaaggatgaagacttgaggaggattgtgtcaaggggcaaagaaaaagagacaagagtattataagaaggagaaaaagaccaacagtttgaatgcaatagaggtgtcaaaataagataaggctggaaaaaatgtttattggattgtttgatttgacaattaaggaggttggtgaccctaaagagagcagttgcagtgagttgcttggaaggaaaatcagctgcagaagattaagagcataatagaatatggatgcaggggagatgtcttagaaaagtttagcaacgggctgggtgcactggctcacgcctgtaatcccagcactttgggaggccgaggtggatggatc

SEQ ID NO: 853 - DNA, 122748 bp, Homo sapiens
  Genbank Accession No. AL031846
gatcccagcatggagggccatgcagtctaatgatggttggacagactggcagaggcagccccgagctgttcctgggtaagaccaagggaataagaccatgattccggtcagttcttggtgaatgtcatccccctaccccaccctcagaacaaatacagattttcaaaatctaccacttttttctttcaaattttctacccatggaagaatgaatgaccatccggagacagcagggaaggttattgcttaatcaagatgctggtgtgtttcagggagctggccagggtggagtaggcttgtggccacgttccctgggtgggaagactgagatggaggtgggcgtggtccagggactgtcaggagcagggctgggggagacgacctggcacagggccgtgcctgcacacagagcaacaacgcccaccatcaggtctgccctgtgccaatcagaaaattctggacagagactgtgaccctctgtgtcactctggggcagggggtaatggttccacacacttctatggggacctggagagtggagaccagagcactggtgggcaggcaggcgagcctgggtctaagagcccactgtgcctgccactgtcccgtacctcggcacgtcacctcccctgaaacctctctttactcatctgtaaagtgggggcaattatacctccctctcaactgtgcacttggagggcagtgagggctggatttgggacagacctggtacgcaccaggcgttgggcaagtctgagtctcctcctctccctgagtcaagctgcctgacgtgatggcagtcttcctgcccacaagttctggtccagcccctccacccaggaagccctcggggaggtgatgccaccggcagcgctgtggttttggcacccacaggcataggatgggctgccgtggaaggtgcctgctgtccctcagggtctgtacctcagccaccctccagggtggggccctatcctcctcccactgccttctccggccctcaccaccccgggcaggcactgcttcccagagagccacccgggtcaggagtaaagtggcctctgtggtcaaagtctgaaaaagttgcccccacacctgcctaacggtgcacagggctttctgggggggtagggaggaggcaggcaagactctggcaccttttctgagtcacatcccttctaccggggccctgagcctgcaggacggaaggatgtggccttgcctgtcagagggttctgagaacacggaaggctcctgagtcctcgaagggcatcctcagtgggagagtggccctgagcagagaggagcgtaaggggcaaggcacaccccttgagaggtcggtgtcagcagcaagcccgtttgcctgtagacatctgtctccactctttatttatacatattttttgagtaagggtctcaccctgtcacccaggctggagtgcagtggcaagatcacagcttgctgcagactcaatctcccgggcttaaccaatcctcccacttcagcctcccaagtagctgagacttcaggcgtgcgtcaccacacccagctaatttccgtgtgtgtgtgtgtgtgtgtgtgtgtgtgtttgtgtttagtagggatggggtttttccatgttgccccagctggtcttgaacttctaggctcaggcaatcctcctgcctcagcctcccgaggtgctgggatcacaggtgtgagccgccactggcaggcatctcctcaacttgacattgcagtgagaaagggcaaaagtagccggtctcacagagcagacatgtgcttcccgtcctgacctgcaacgtgctgcctccttacaagtgctaccagatcacctggttcatatcccggagccccagcccggaccatgtggtaaaagtggccgagtacaacaaagtgaagctgagcatcttcattgcccgcctctatcacgactgtgacccgggattccagcacgggcttcgcagactgcaggacacagaggcacgcgtgcacatcatgtcttctaagggtgagaggttggggcctgaggggtgtgtgtgggggagggacagcatgaggggcaggggagtctgggatgccattgggacgatgtcccaggagagcctgcagggactgagccagcactgacagccaggagatcacacctaggaggggcaggcccagggtcaggggagagaggtctgccgggcctgacttctttctcccctcttttatctcagaatttgaacactgttgagaagactgtgtacaagagagatgtgccatgtcagccttgcaagggacagcgtgaaaactacccatctccggtcaccaagttgcagggtagcctcacagctgatgccctcgctcctctcggctcctgctcagcctcctgatgccttccctctgtcctggatcagattcacccctgcctgggccttctgagctgctcctgccctgagtaccacccctcagtgccccccacctcactgcctcttccccactttcctgaccctgcctgtgagaggctgctttctgcctccatagcaacctctatccaccccccagtctccttcctcccatcctgggggcccctagcctggctccttccatctcctcatcatacctaaatcttgtcattgaactgatataaataggtagtagaaatatacataagtgtgaaagttaagttttgagaaacaccttttgtaaaaaaccgatggtaagtattgggtcattcttgtcacacccaactcaaacagaggccaggagccaggaggggaaaccactcagtttgcaaaacgtcgcttccacaagcctgatggctgaaactgctcactgtaccctgaaaccagctttacctacagcttctgagataaactgctgcaactctgggacccacgatgcctatcacagtggctcatcaatggaacctgccggctcccaacccttcctagggcccatgaactctctgaaaagaggaacagaaatatttctcctttttgtaaaatctttaaccttccctttgttcttcatgtacacgctgaactgcaattcttcttcccaaataaaacattaaatttagaaatttctctccatagttttattttgacttcaacatacgtggggtcagaagtgggatccaattctcacttccctccaggggaatcagcagcccacagaacgatggtgggaggtacccacgctggtaacctcttctgccccctggcagatctttcttggacaaaactccagaattgggtttgcattctgtttcatttgggataaggctggggaggggtctttccccttcctgtttgggagattttctgttaggagggttgttttcctcccgttgatctgggctgtgaggtttggacctcgacaagtttggaagaggtgattccccctcatttggagaaagctatcatccttcctggtaaacacctactttatttcccatcagtgcttgcatttattgtgcttttgtgtatttgatgtcaaactaaattacctagataaactgagcaacaggcagggcgcggtggctcacgcctataatcccagcactgtgggaggctaaagcaggtggatcacctgaggtcaggagtttgagaccagcctggccaacatggtgaaactctgtctctactaaaaatacaaaaattagctgggcgtggtggcgggcgcttgtagtcccagctactcggtaggctgaggcaagagaattgctggagcccaggaggcagaggctgcagtgaaccaagatcatgccactgcactccagcctggatgacagagtgagactctgtctcaaaaaaaaaaaaaaaaaaaaaaaaaaaaaactggattacaaatgaaatcaaagttcaaaggcatgccaagatattttctgggactcccgcctgtaacgtcttcaaacattatagggattattcaatctattgttctttttgttttgagatggagttgttttttgttgttgtttttgttttgtttgtttgttttttggagatggagttttgctctgttgcccaggctggagtgcaatggcttgatctcagctcactgcaacatctgcctcctgggttcaagcgattctcctgcctcagcctcccgagtagctgggattataggcatgcgccaccacgcctggctaatttttgtatttttagtaaagacggggtttctccatgttggtccaggctggtctcaaactcccgacctcaggtgatcggccagcctcggcctcccaaagtgctgggattacaggcatgagccaccgtgcccggcccaatctattgttcttaaaactaaaccaaaagaccatggtttaaaaatcatacactttaaataagatatgcatatctcattgatatcttttttttttttgagatggagtctcgctctgtcgcccaggctggagtgcagtggcaggatctaggctcgctgcaacctctgcctcccgggttcaagagattctcctgcctcagtctcccgagtagctgggattacaggtatgctaccaccacgcccacctaatttttgcaattttagtagagatggggtttcaccatgttggccaggctgacctcggactcccaaagtgctgggattacaggtgtgagccaccatgccaggccctggataactttctttaaatcaacaaagtaataaattttgtcacactgtcagcttgcttgcatgtagacatggcttaggttttacattggtaagactccaatataaggagagtttaggccaggcacagtggatgaggtcattggggtagttcctaatccaataaatctggtgttcttataaaggggagatttaggccgggcgtggtggctcacacctgtaatcccaacactttgggaggctgaggtgggcagatcaggagtcagaagtttgaaaccagcctggccaatatgatgaaatcccctctctactgaaaatacagaaattagctgggtgtggcactgcacacctgtgaacccagctactcgggagtctgaggcaggagaatttcttaaacctgggaggcagaggttgaagtgagccgagatcgcaccattgcaccacatcctgggtgacagagcgagactccatctcaaaaaaaaaaaaaagaagcttaaaacaaagacgggacgttcttccttctgccttctgaggcctccctagtctgtagtgccggagcttctaataaatgatcacaacttcaccgcaccctgtggctcagcttgagttctttcctgtgagagatccaagaacccattcttggggtctggatcgggtccccctttgcagcaacgaacacaggccagagtggccagcctaacctcccgtcctcctggagataacacctaagcacaggcccgtcctagacaccacagggtctctgctgcaggaattcactggaggagtagtgggaatgctgcctgtgggaaggaccaggaaagggttccgccttcctttccatcctccctgcttctcagcctgggagactcagctctgtgattaaccagcactacagtgtgcagatctgatgtctctcctggcaggaccccgctcattctggaatcttccatggactgtagccccaacatttaggacagatagggtggaggggatgccattcccaggaaccttctaaattctcacccaagctcctgtgaccccaggggccatgcagggtctagagggctgtcagggtgtgcagggcgggaggatatggagggacaagctgggcaaggttcaatgggactccttggtgtggaacctagactccgcagtgactgcccctagtcctcgcccttgggattcaactttcctaggggttctttggtttttctttttcttttcttttagacagagtcccgttcttgtcgaccaggctagagtgcagtggcacaatctcggctcgctgcaacctctgcctcccaggttcgaatgattcccctgcttcagactcctgagtagctgggattacagatgcccgccaccacgcctggctaatttttgtatttttagtagagacgaggtttcaccgtgttgcccaggctggtctcgaactcctgacctcaggtcatcagcctgcctgagcctcccgaagtgctgggattacaggcgtgagccacagcacctggcctggctctttggtgtttatgatctgaagggtgttggttgatatgcatgaagacgaggacatgggttccagaatgcaaatgtgaagtccaggtccttcatctctgacctgggaggccctttaggagcagtaagtcccctccctcgtgtctcctctcctgctcctttccatggagcaatgaagaacctcaaagtagctagctgtgggggagaagggacacaggaagtcctggccagcactccagctctgctgttgatttgctgtgtgacgtggggacagtatcttagcctctctgtgcttgggacctcctctgactgtcaggatcactgccctcccctcccagtgctatctggggactgggctagataatgggcactggatccgctggagatgcagtcctgagcctgaccccagtgctcatttcacatcaggctcagggtcctgccaggaggctgaatgccaaaggtcagtggggtggtggggagggggctgcagcctgccctgtccaccaggggagtggcatctggtctatggtgtcagccctggtctggatccctgctcctttctgtggcttctattcctttcatttattttagtttagtttagtttttgagacggagttttgttcttattgcccaggctggagtgcggttggccaggttgattttgaactcctgacttcaggcaatccacctgcctcagcctcccaaagtgctgggataacaggcaccgtgaccagccatcaattcctttcttttttctttcttttttatttttatttatttatttattttttgagacagggtctcgttctgttgccagggtggagtgcagtggtgcgacgtcggctcactgcaacctctgcctccaaggttcaagcaatttccctgcctcagcctcccaagcagctggaactacaggcgcaggccaccaaacctggctaattttttgtattttagcagagacggggtttcaccatgttggccaggatggtcttcatctccttaccttgtaatttgcccacctcagcctcccaaagtgttcggattacaggtgtgagccaccgcatctggcctttgttcttttgtaaactatacctggggagggagttgagtctggctgtacctggagagggaattgggggtgggaggatgggaggtgagccacctccatcagacttcccctgccaagcccgaggaaatagagaaagaaaggagcctgagggatctgaagcaccccagggccctcccactccagtcccacaaaaggaagagggtggagccaccctcatcaagcagtgactttttgtgacttttgggagagctgaccttttgtgacttttgggagagctgccaaaagtgaaacttagtgcctcagacaagcaggggcaagtctgctaaggaagctgtggccagaagcacagatcaggtactgccgcccactctgtccactgggccctctgctgccacttcctgcctggcagcccttctgtgcctcagccctggcctcccgctgccccagccccagccctgggctccttctcctctggctcccctgccatccccactcccacccaggctctttgccctgctgtgtggtcaccccactgctgcttctgaacgggccgcctccccggcctgcaccagcccaagacccctgctgagactctcccctaagagtcatggctgggctagtgctccccaccttgggagggtgctctctctgtgtgcttcctgccattcctgggctctggaactgggagaactgaactaaaggatgatgggagcaatctggaattttgttcacagtgctttgatgaactttgtgtaagattactttgtttcaatacaaagtcttaggagagggtgtggggaggcaatgatctctgaagcacaaggcaaatcatctcttccaaggatgtctccactgtgggcagaggaggatgcagatgaccctgaacacacactcctcctccatgatcagtattcacattcaccgtttataatgacaccagtaacacggaatatacggaaaaactcaatgatcaggagaaatgcttttattttaaaatttaggaagaagagagcctggttcccaaaggctccctcctgcagggcccgtgatgcagaggctggcagggctggccaggaaagtggcccagctccatggcctgggcaggttaccccacctctctgcacctctggcccctcctctgtaagatgagaatggcccctgcaggcctagggcagcctcacgtgagctcagatcctctcagcacttagaagagtggcctgggcctggggatggaagtgctaccctgattttttgtttcgttttgtttttttgagaaggggtgtctcagtctgttgcccaggctggagcgcaatctcggctcactacaagctccacctcctgggttcacgccattttcctgcctggccaggcaaaatggctcatgcctgtaatcccaacactttgggaagctgagaggggaggatcatcactaaaggccaggagttccaaaccagcctgggcaacacagggagacccccttatctactaaaactaaaaaaataaaataaaataacatgaataggtaaaatgccaggaattaattgaactgaaatattaagagctcttattttgaaggggagaattttattcacttttcttatttttaatgggttagaggatgggtggcagaaatactgggaggatgggagatccatccctggaaagaccagagctagggccctgagctgggagaggtcaccccggccctgctgcccctgccagcatctccttctcttctcctctccctggtcttcctgcttgggaaagctgcagaaattctcaggacttggaggcttgaaatgctcaggggttttccagaaagcagaatagaaagtagatgggcaaccatcaatcagacaggccaaagaaaaggagctcaggccctcggggagacaggaggtgagcgcatgggtcacaatcctggcggggcgcggtggctcacgcctataatcccagcactttgggaggccgaggtgggtggatcacctgaggtcaaaggagttcaagaccagcctggccaacatggtaaaactccatctctacaaaaatacaaaaattagccgggcatgaaggagggcgcttgtaattccagctacttgggaggctgaggcaggagaattgcttgaacccgggagaatcacttgaacctggtaggtggagcttgcagtgagctgagattggaccactgcactccagcctgggcaacagagcaagactctctctcaaaaacaaaaaaaaagcaaaatccaaaattgaatcctctgtagaatgtaatcacaattcaggagagcaaaatctatgtaatttcttcagccaaaaatgtgtcacaacactcccttggtgacaacagcttttctgttcactcaactgtgttctgtgcagacaaacttgtcaaacacacacctgagcaaagagcacagtgctggaggaagccccagtttccaccccatcactccccaaggggaagggttctggtattggacatgtaggggtcgagaggcctgtggacctcaaggagggggtgtccaactgcagctggaaagagggatctgggactcaggccagaggcgtgtgagcagctcagagcagctctgagcccaggggagccagaaaggcacacccacagttctcaggcaggggatccccacccaacccaggaagaatagtgacgaggtcggggcatccccatgcaaagagcctcagctgtgggcagcagccggtgccctcccaggtgggaggatgggagatagcagacaaggtgggagggagcactcccctcctcctgtcctcctgccagcccttccttcccctgctccactgcagtcctcctggccaacaactaaaggggagaccctccctcaccaaggggaagggcccaaatgaacagaaagggttgggtttggctgggcgcaggggctcacacctgtaatcccaacactttgggagaccaaggtgggtggatcacctgagatcaggagttcgagaccagcctggccaacatggtgaaaccccgtctgtactaaaaatacaaaaattagccaggcgtggtggcaggcatctgtaatcccagctacttgggaggctgaggcaggagaatcgcttgaacttggaaggcggaggttgcagtgagccaagatcgggccactgcactccagcctgggcgacagagcgagactctgtctcaaaaaacaaaaaagagttgggtttgaaaagtggcttgagcctggggtgactcaagaggacgctcccttcatctttggttttcccctttctgttgcacagaaacacgatggctctgttaacagccgaaacattccgcttacagtttaacaacaagcgccgcctcagaaggccttactacccgaggaaggccctcttgtgttaccagctgacgccgcagaatggctccacgcccacgagaggctactttgaaaacaaggtgccacacgggctctctgggcacagggccggcaggggctaaccccatctgatgtgtgcagaaaatacatgaaatgcctgcctataaatttctcaatttttgatgtaacaccctctgtgttttcgtaacccttggtgcctgcctgggttttggcttagctggatctgagtggcccagtttccctaggacactcccattctttcccgtccccggacctctgaagaggccaacccttctgtagaatgctccttctgcccctctcatttactcattctcccgatctcagctcagtcactacttcgggaaagccgaggtgccgtgccacggtccgagtgcaactccatcacacccctgtcctctccgctctattgccagcccctacctgccctgcctccccgcctccccgccccccgccccggctctcacctgctctttaggatcatcccgggttggacacagcctcctaggcgggtgtccaaaggcagggtccacagagcttcgggactggggcgtggaggtgttgtctcctcctctggacacagggatctttgtccaatttacagaaagatgtggaagtcctgggacagatgaattaacacacgggtgcgtgagtgcagggctgtataaaccagggaaggcaggaagcgggtgcttgccctgcactaggccaggccacgcactagaaagttcaccggacagacccctctgcccccccatccccgcccccgtcccggcccccgcccccagtcacatgactcctggcctctctcttctcccctcccttctctctgtttgggaccctccccagaaaaagtgccatgcagaaatttgctttattaacgagatcaagtccatgggactggacgaaacgcagtgctaccaagtcacctgttacctcacgtggagcccctgctcctcctgtgcctgggagctggttgacttcatcaaggctcacgaccatctgaacctgggcatcttcgcctcccgcctgtactaccactggtgcaagccccagcagaaggggctgcggcttctgtgtggatcccaggtcccggtggaggtcatgggcttcccaagtaggaaagaggctttgcagttataagagtgcaaacccccgggggcacaggcttggcaggggctgggggttgggggttgggggttggaggaggttggcggggggcgggggcgggttggaggaggttggcggggggtgggggcgggttggaggaggttggcggggggcgggggcgggttggaggaggttggcagggggtgggggggtggcggggagcggggggtctgtgggaggccaggaaggaaggattgtggctcagtcaaggcccaagatctgacaccacccgggagggagaattccccagacagagcaatgtccagggagaggaagagaagagaggggaaaggaagcaagagctcctggcactgcagctgctgcccctggggcctggctggtttccctcttccctctcagagtttgctgactgctgggaaaactttgtggaccacgagaaaccgctttccttcaacccctataagatgttagaggagctagataaaaacagtcgagccataaagcgacggcttgagaggataaaggtgaggcactgtcctgcctgctgcccccgacctcctcaccgcctgccgcagccccatacccagtcacacctctgcccactgcccttacccctacctttttttcttttcttttcttttcttttttgagacagggtctcactctgtcacccaggcaggagggcagtggtgtgatctcggctcagtgcaacctctgcctcccgggttcaagtgattctcctgcctcagcctcccgagtagctgggagtacaggcactcgccaccatgcccagctaatttttgcatttttagtagagatggggtttcaccatgttgcccaggctggtcttagaactcttggcctcaagtgacctgccttccttggcctcccaaagtgctgggattacaggtgtgagccaccgtgccccgccccactacctgtttcttttttgtgttctcctctcgcaccaggggctccttcttgttcttttagattccaggggtacgtgcgcagggtcgttacatggatatattgtgtgatgctgaggtctgagtcacccaatctactggaacatagcacccaataggtagtttttcaaccctggcccccctcccaccctctcttcttttggagtctccagcgtctattatttacatctttatgtccatgtgtacctctcaccatatacaaaaattaactcggccaggcacagtggctcacgcctgtagtcccagcactgggaggccgaggcaggtgtatcaagaggtcaggagttcgagactagcctggccaacatggtgaaaccctgtttctgcacctataatcccagctactcaggaggctgaggcgggagaattgcttgaacccaggaggtgggaggttgcagtgagccgagatcatgccactgcactccagcctgggcaacaaagcaagactctgtcccaaaaaaaaaaaaaaaaaaaaaaaaaaaaattaactcaacatgtgctgagcatgaggactcatgcctgtaatcccagcacttcaggaggccaaggcgggtggatcacttgagcccaggagttcaaagaccagcctgggcaacatggcaaatccccatctctacaaaaaatacaaaaatcagccaggcatggtggcatgtgcccgtggtcccagccattcgggagggtgaatgggagattgcatgagttcagggaggtgaaggctgtagtgagctgagatcgtgccactgcactccagcctgggcaacagagtgaggctttgcttaaaaaaataataataacccaagatgaattaaagacttaaatgtaagacctcaaactataaaaatcttagaagaaaacccgggaaatatgaaatactctactggacactggtctatgcaaagaatttatgattaaattctgaaaagcagatgcaaccaaaacagaaattgacaattgggatctaattaaatggagcacagcaaaagaaactatcaacagagtaaacagacaatctcccttttctaagatgctcttgtcacctccgtgtttttctccaggccttctgggcccttctggtgccagttcttttctcttcctaatgatctcatcctcacctctccctcccttcctccctgtggtgtcccaccagttggtacctcctaacttctctctttccctctcagcagtcctgaagtgtggatgttttagagaatgacttaagaagtttgcagcttggacccgtatcccactcattatcaagaagcaactcaagatgactttccctggggcatgtcagttgcctcatagcctgctggtcctgtaagcaagcactaagctccacagtgccagttccttgccccaacctggccccatccaagtacagaagaccttcctttcctcctttttccatattgctttctgttctaagtgggtgaataattttataattgaaaaaataaagataaagtctgtaaatccagccgggtacggtggctcacgcctgtaatcctagcactttgggaggctgagatgctcggccaataaatttctattgtttatgaatcacccagtctgtggtattttgttataggacatatggactaagatactgagttaaggccaggtgcggtggctcatgcctataatcccagcactttgagaggccgaggtgggtggatcacctgaggtcaggagtttgagaccagcctgaccaacatcgcgaaaacctgtctctactaaaaatataaaaaatagccaggcatggtggcacgcgcgtgtaatcccagctacttgggaggctgaggcaggagaatcacttgaacctaggaggtgggggttgcagtgagccgagatcacgccactgcactccagcctgggcaagagaatgagactccatctcaaaaaaaaataagaaaaaaggccaggcacggtggctcaccaaaatgctgtaataccagcattttgggaggctgaggcaggtggatcacctgaggttgggagtttgagaccagcctgaccaatgtggagaaatcccgtctctactaaaaatacaaaattagcctggcgtggtggcgcatgcctgtcatcccagctactcgggaggctgaggccggagaatcgcttgaacctgggagatggaggttgcagtgagctgagatagcgccattgcactccagcctgggtaacaagagcaaaactccatctcaaaaaaaaaaaaaaaaaaagaaaaaagaaaagtacaaaggattttattctacagcaccaaaaaaataaaaataaaaaaacaaacaacaacaacaatgctctattgaaggagtctctgttgagtctagaatcgctgcattattttgtagtccaggtaacctctgtcctttctcagtatctgtgttcaaataaataaggtcaaactctatggagcagaggtgcccacaaaattgattgaaaaaagcaaaaaacagccaagtgcagtggctcacgcctgtaatcccagcactttgggaggctgaggtgggcagatcacaaggtcaggagttcgagaccagcatggcgaacatggtgaaaccccgctctactaaaaatacaaaaaaattagccgggtgtggtggtggacacgtgtaatcccagctcctcaggaggctgaggcaggagaattgcttgaacctgggaggcagaggttgcagtgagctgagatcacaccactgcactccagcctgggtgacagagcgagactctatctcaaaataaaataaaataaataaaaattataattatttatagtcatttccacagttaattgcttaaggctgatgcagtttctgaaaacttcagaagcatgcaaaatcctagaatatggtatcttttaaaaggttcataaaaggactctgaaaagcacctttgaatacaggtttctagtaactttaaaatcatatcatgtaaaaataaataaattttgaaagatcacatcataagtaagaatttcccatgaattccacaattccccaagaattggactgggtaagaattcctgttgcttcaataagaaaagaaaacaactgactggtttataaaactgctaacacaagtaaaacaaaaattcatgaaataccaaaaaactttgccagattatcatgctaaatcggccaatattaaaattgtttagatatacaatttgaatgaactttatggtctaaatcaaattacctatgataacccattagttatcactgctatgcacctagattggagaagcagctggtattcaagaggacataagtccagtgttaagcatggactcatggagaaccaggacggccgccttgtccttcctgagtcctaaaaacttttgttattaaaggttctatattccatgactcatcatggaaaagataaaataatccaaattgaatatgtggacttacaaattgaggaaatagtttatttttatttatttatttatttttgagatggagtttcactcttgtggcccaggctggagtgcaatggcgcaatctcagctcactgcaacctccaccccccgggttcaagcgattctcctgcctcagcctcccgagtacctgggattacaggtgcctgacaccacgctcagctaatttttgtatttttagtagagacggggtttcaccaggttggccaggctgatcttgaactcctgacctcaggtgatccatctgcctaggcctcccaaagtgctgggattacaagcgtgagccactgcgaccggccaaggaaatagtttaaaatcaatgtttggttgcatattcttgggaagacaatcaaagcttcaggtacatttggctgcgtgatgggccatttaaacatttataaagggatttcattcaattgtcattttcagtgctttttttttggttgtataaaagctttcccatgcaagagggctaatgtagcagtagattattgtgctacagtgtattttcaccagataaagaaagctttgtgtggttcactgaggacaaccctttcacaatccagaacccgaagaatggatcttctgaacatcagagaaagactgtccttgccatccacattgcagcaaaactttggaaccttgaactttgggttcataatctcacaactgagaagcgaccctccacattcttggaactgttcacccaccagaacccttaaagtaaaactaaccagagatgtcactccccagaagaagatggcatccttaatgtgaacagcttttcccaagatcacagatcaagacttctctaggctgggcgtgggggctcacgcctgtaatcccaacaatttgaggtgggaggatcacttgaggtcaggagttcgagaccagcctggccaacatggtgaaacctcttctctactaacagtataaaaaattagccaggcatggtggtggtgcaagcctgtaatcccagctactcagaaggctgaggcaggagaattgcttgagtctgggaggcggaggttgcagtgaaccgagatcgcgccactgcactccagcctgggcaacagagtgagactccatctcaaaaaaataaaaaaaggtttttctattatcgtgagactcttatccttgaatattttttcttatttatgcctctatgaacaatagaagtggaaaaggggtctattatgtgcacttatggggtatacttttatttgtaaaggagtttgcagccagccttatatatgaataaccttatactttaatagataaaagataaaggcccagtgtaggtgaaaaactttaatggtacatatgttgcctcataataagtcagaaacagaacattcattcatgtctcttaacccacatcacgagttaaagaaaacactgcctttactcttctagaaggacatcatttgttaggtcctttttccatagtttagaataaaagtggcaatacttagtatgtatccctcacaatagactctatagcagattctacttttttttgggtggggggggtaacagagtctccctctgtcacccaggctggagtgcagtgacacgatctcggctcactgcaacctctgcctcctggattcaagcaattctcctgcctcagcctcctatgtagctggaatcacaggcgcccaccaccatgcccagctaatttctgtatttttagtagagatggggtttcaccttgttggccaagctggtctcgaactcctgacctcaagtgatccgcccgcctcggcctcccaaagtgctgggattacagcatgagccaccacagctgaccctttttttgtttgtttttaagatggagtctcgctctgtcacccaggctggagtgcagtggcgtgaccttggctcgctagaacctccgcctcccgggttcaagcgattctcctgcctcagcctccccagtagctgggattacaggcacgtgccaccatgcccagctagtatttgtatttttagtagagacagggtttcaccatgttggccaggctgttctcaaactcccgacctcaagtgatcctcccgcctcggcctcccaaagtgctgggattacaggaatgagccaccatgcccggccagcagagtctactttaaagggtagcattatacagcagactttaaattctcttgtgaaagttatgctgaacaatagaattcacgaaacagaaaagtacctgggctgctgttgacacttgtggcctgtggagaaatacatcaaatgtaggttacacaaattcagttgtagtagattaatgaaaagactacttagtcaagatgaagagtagactcttcatccagctcattttctatttaattttaaggtttggtgtatggggaccctgggtactccaaattcttggtgttatcctcccgatagtcataatagtctccctgatgtgctgtattctctcaaaggtttttaatgtttgtacacagccagctctaaaacatcaaatggtctctcttcaactggaatgacaaaagctaaaagaaatgtgtgaccatgaggtcaccatgacctatgaatgacatgctgagacccacaacccaaaatgataacagagtggtgataaggccctaagttttggtcacactctcacttaagtgagaacctggccaaaaagggggaatttttaaaacaaaattaaggacggccattattttggactgagctcatacactaggcctcaacagaccaaaccaaacaaaatggagtcactcgtgctaaatgtgacataatcaaactaagactttaacgaaacatagatcctagaacacaccaggttttgtttttctcctgtaaacagaacatcccagcataaaggggtaccgtctactcagttcttgttccctcctcacaaaacctactgttctactgtttcccagtgggtttcaagaccaaataagcacatttatgatggtaacagtgacatcaatgactaatgttttcatcagtctctcaaattgagaaaattatcaaaagggggaaactggccaggagtggtgccttacacctgtaatctcagcactttgcgaggctgagcaggcagatcatgaggtcaggagatcaagaccatcctgactaacacggtgaaaccccttctctactaaaaatacaaaaagttagctgggcctggtggtacgcacctgtagtcccagctactcgggaggctgaggcaggagaatcacttgaacccaggaggcggaggttgcagtgagctgagatcgcactgttacattccagcctgggcgacagagtgagactccatctcaaaaaaaaaaagaaaaaaaaagaggagggggattgttatagcaaactaaatatggcctgagaaggactccatacttctatatttgagtccttgtggatgaactgtaacctagcttaacagtcagacaacatttaaaacctcatttaggagtatgcacctgtaacaataactgaggctgggccaatcctagcagccatacttcaatcactcatagactgctgtgttcaaactgtgttcaaataaagtaaacgctaacctgtaagcaatccgtctgtttctgtacctcgctgccgatttctgtatgtcatttccccttttctgtctataaatctttttccaccacgtatctgcactcagtctctgtgaatctgctgtgattctgtgggctgaccgattcgcaaattgttcattgtccaattaaactcctttaaatttgggccaggcacctgtaatcccagcacttcgggaggccgaggtgggcagatcacctgaggtcaggagttcgagaccagcatggccaacgtggcgaaaccccatctccactaaaaatacaaaaattggcagggcatggtggcaggcgcctgtaatcccagctactaggggggctgaggcaggagaatcgcttgaacccagaaggtagaggttgcagtgagccgagattgacccattgcactccagcatgggggatggagtgagactcagtctctaaaaaaaataaaaattaaaattaaaaaactcttttaaatttaattcagctgaagtttttcttttatctgtaccgagcttaatacctgggtgatgaattaatctgtacaaaaacccccatgtcacaagttcattgtcgataaaaagagtaaaactctgtaaaatatttgaagagatttattctgagcataatatgagtgaccatggcccatgacacagccctcaggaggtcctgagaacatgcgcccagagtggtcagggcgcagattggttttatgcatttcgggaaggaatgagacatcaatcaaatacatttgagaaatacattgggctggacgcggtggctcacgcctgtaatcccagcactctggagggctgaggcgggtggatcacaaggtcaggagatcgagatgatcctggctaacacagtgaaaccctgtctctactaacaatataaaaaattagccgggcatggtggcgggcgcctgtagtctcagctacttgggaggctgaggcaggagaatggcgtgaacccgggaggcagagcttgcagtgagccgagatcgtgccactgcactccagcctgggtgacagaccaagaccccgtctcaaaagaaagaaagaaagaaagaaagaaatacattagattggtccagaaaggcgggacaactcaaaggtaggagggcttccaggctatgataaatttaaacattttctggtgaagcaggggttaaaagagaaaaacaagtttcctcttgctaggctgacccactccaagacctggtgataggcagcagagctctggcaaagatttgataactatctgcaaaaccagagccctcaaaggatgtgctccagagccccctcccctcccagttatgggcaaggacgagaaaacaggttcttctcctatcccagctccccactcccctcttagtaacccttccttagtgaaactcaaggttactttacaaagttttacggattcctgtttctcctctgtgtaacataacaaggtcatcagacatgctcaggtaagacatgtaccagctgtaaatcctgccttagtttggtaagttcctgttttttcctcaggttgcaaaacctgtcactgtatgattaactgcctttgttctgcctctgtaagtccgcttgcctgccttgtaagctttgtgcaactagatggccaaccccctcagttgtatgtataaaagtcaagccccgtctttgttcagggctcagcctttcggatgcgaatctgctgagccggtgcacactttaataaaatcctcctgtttcacccatttggtctctttggtcctttgattcctacaacactagttgacgatttgcttgtgataccctaccttgtttaacctgagtaactctctcctagcagagagagagccggacagactccattttagtttcttcacttgcagcctcccttaaggcataactagtgtaaaccgactcacagcacgtccaggaatgcacctactgagaagatactgaggcaagctgcactagcagctcctggggacgcgcgtggtggatggcacccaaaacccctgcatttatctcttcgtgatagtttaggcccctgcacctggaactgtttattttttgtaactgcatttgtaaccaattaatttttttaactttttgccagttctgcttctgtaacaattgcctcagctaaacttccccctcccctatttagaccatggtataaaaacaaaactagccccttcctcagggctgaaagaattttgagcattagctgcctctcggtcgccggctaataaaggactccttaatttgtctcaaagtgtggcatttctctataactcgcttggttacagcagctgagctgtctaaagacctgggatcactaggatcatagaaaagaaatgttcaggttaaaacattgtggagaccagccaggtgcagtggctcacgcctgtaatcccagcactttgggaggctgaggcaggtggatcacctgaggtcaggagtttgagaccaccctggccaacatagtgaaatcccgtctctattaaaaatacaaaaattagccaggtgtgatggtaggtgcctgtaatcccccactccaaaggaaaaaaaaaagactgcagagaccaaggttcttttgaagtcttatagtggctgcctttagagataatagatgacaaatgtttcctattcagatttttttttgagatggagtctcgcactgtcgccaggctggagtgcaatggtatgatctcggcttactgcaacctccgcctcctgggtacaagcaattctcctgcctctcagcctcccgagtagctgggattacaggcacccaccaccatgcccggctaattttttgtatttttagtagagacgggatttctttatgtgggccaagccggtctcaaactcctgacttcgtgatccacccacctcggcctcccaaagtgctgggattacaggtgtgagccaccacgcctggccctattcagattttttaaaggtgctagactcctagttaatctgtttaggattgggagggcctggatctagctacattaatagagattctttacagttgcaaattttcccccacaaaggacagctttgcagggccatttcaagatatggcaaagaaacatgttttaagataaaatatttttattttcttccttgtctcgtaatgctatgccagagtcaggttggaaagtgagtcacgatatgtagggttaaataaaacccatctagtgagaatttatgatttgtagggcatgactcctcagatcccttagataggaatttgagcaaaacaaaaaaatcacagtgtagtcctcatcacccatgtaacaaaccattcgttgtccccctgtacctataatcaaagtttaaaaaataaagtatttttgaaaagaaaatgcagtatatacaaacagtagaatattaggagattctatcatgtgctacaaagtaggtggtatgtacacatagtagaatattattcagccttgaaaaaggagattctgtcatacctataatatgtttataataaaagttttaaaatatacccctgtacctataataaaagtttaaaaaataaaataaagtgttttttgttttgtttttgtttttgttgttttgagatggagtcccgctctgtcgcccaggctggagtacagtggcacgatctcggctcactgcaacctacgcctcctgggttcaagtgattctcctgcctcagcctcccgagtagcttggactacaggcacttgccaccacgcctggctaattttttgtatttttagtagagacggggtttcaccatgttagccaggatagtctcaatctcctgacctcgtgatccgcccgcctcggcctcccaaagtgctgggattacaggcatgagccaccacgcccggccaaataaagtagaaataaagccaaataaaaaagaaaatgtggtatatacaaacagtagaatattagaagattctgtcatatgctacaaagtaggtggtatatacacatagtagaatattattcagccttgaaaaaggagattctgtcatgcactacaaaataggtaaacctggaggacactatagcaggtgaaataagccagtcacaaaaagactaatactgcatgatcccacctccttgagatatctacaacagtcaaactcaaggaaacagaatgtagaacaagggctatctggggctaggggagggggaaactgagagttgtcattcaatgagtatagagtttcagttttgcaagatgaaaaagctccagagatctgtcaccaaacaatgtaagtatagttaacaacactgggccagatgaggtggctcatgcctgtaatcccagcctccctgaggagggcgaatcgcttgagctcaggagttcaagacaagcctgggcaacatggtgaaacttgtctctaccaaaaatagaaaaaaaaaaaaaaaaaaagccgggcatggtggcgcatgcctgtcatctgagctacatgggaagctgaagtggaaggattggtggacctaggaggtggaggttgcattgagccgagatcgcaccactgcatgacacagtgagaccctatcttcaaaaaaaaaaaaaaaaaacccactgaactgtacacttaaaaatggttaagaagccagatgtagtggctcacacctatattcccagcacttcccagaatttatggtttgtagtgtaatgcctaactttgttttttactaaccttattttaaccttgtttttactaaccctatttttaaatgttccctttttgtctccttaattacctagccttgtttcccatatgaatagactctcccttagcggggaaagccgacgaactccatctggccccttgatttacaagacgttaagggctccttacccgacccccttcgtcaaggagttaacctgtgtaagctgatcctcagcatttcaaaggagctcaatgaactgataaggtactagaacaaacaatgtatgaagttcccaggattttgctcaaaaagataacaacataaagccttgagtctgtgtccggcatagcatccatatctaactcttatgaaggatttagagccccgcacctggttccgttgctttttttgtaaccatttgtcttttaaattgtttatttctctgtaaccatttgttttttgattcttgcgtgtttttacttctgtagaattattgcatttgagctcccctccccttcctaaaccaagctataaaagtaaatcaagccccttcctcggggccgagagaattttgagcgttagctgtctctttggccaccggcttaaataaaggactcttaattcgtctcaaagtgtggcgttttctctaactcgctcgggtataacagtagggcatgactcttcagaccccttagataggaatttgcacaagctgaaaagatcagagcttagcccacacaaagtagatgaataggagaaaaggcatactaatttattaacatgtccatgagagagaatgacagagggagcactccaaccccacaaagagctgtagcagttcatataccatcttgaggttacagaaagatttggggcttggatcctggcaaaacaggctatgggaaagggagaagaggaggcctggctggcaaaggtggtcttgttatgtagatgaaacctcacagatagcagtcctcggaggaaaaagatggtaaatgtttctttcagagttttagggtgtcagaatctcagttcctctttcctagatctggacaagggagggcctgggagaaaaccaggctgcagcaatgcagattttctacagatgcaaatctcccccacaaaagaccgcttttgccgggcgcggtggctcaagcctatctgtaatcccagcactttgagaggccgaggtgggcggatcacctggggttaggagttcaagaccagcctggtcaacacggggaaactccatctctaccaaaaatagaaaaaaaaaaaattagctgggtgtggtggtgtgtgcctgtaatcccagctactcatgaggctgaggcaggagaatcgctcgaatccagaaggcggaggttgcagtgagcagatatcatgccactgcattccagcctggaggacagaatgaaactcagtctcaaaataataataataatagaagaccgctttgcagggctgcttctgtttgcaggagcagccatctcaaaatatatcagagaaggatattttgattacctttactagcctttcaggtctcagaagcagatagatgatgatggatagatggatggatagatgaatggatggatggatagatagataggtagatatgaggactaagctctgctttttttttttttttaatcttgcccaaattcctatctaaggggtctggggagtcatgccctataaaccataaattctcatcagatgagttttatttaaccctctgtttcatgacttactttccaatatgatcgctgaaggggttcaccttgcccactgcctagacagagctgatttatatcaagacacagcaattgcaatagagaaagagtaattcacgcagagcaggctgtgcaggagactggaattttattattactcaaatcagtctcacggaaaacttggggatcagaggtggttttttgttttttggtttttggttttttctagaaggagacttgctgtcatccagactggagtgttaccggtggtgacagtctagcaccttttaaaggtctgataggaaacatttgtcatctcttgtctctaagggcagccactatgagacttcaaaagagacttggtcttcacagtcttttattttattttattttatttatttttgagacacagtctagttttgtcacccaggctagagtgcagtggacctctgctcactgcaacctcccgcctcctgggtttgagagattctcctgcctcagcctcccgagtggctgggattacaggcgtgccaccatgcctggctgatttttatatttttagtagagatggggtttcgctgtattggtcaggctggtctcaaactcctgacctcaggtgatccatccgcctcggcctcccaaagtgctaggattacaggtgtgagccactgtgcccagccacaatcttttatcttaacctcaacattttctttctgttgatcccaggtctttagacaaactaaaccgactgtcaagcagaaaatgtttaaatttacctatagcctggaagccccctgacttcgaattgtcctgcctttctggaccaaaccaatatatgtctcgaatgtatttgattgatgtctcatgccttcttaaatatatataaaaccaagttgcaccccagccaccttgggcacatgttctcaggacctcctgaaggctgtgtcatgggccatgcttactcatatttggctcagaataaatctattcaaatattttatagagtttgactcttttcgttgacagatagacagacagatactggcataggaatagacaggcaaatctaagacttttaatctctctctttttttttttttttttttgagatagcatctcactctgtcacccaggctagagtgcagtggcgcgatctcggctcactgcaacctccgcctcccggattcaagtgattctcctgcctcagcctcccgagtagctgggattacatgcgctcgccaccatgcccagctaatttttgtatttttagtagaaacggggtttcaccatgttggccaggctggtctagaactcctgacttgaggtgatctacctgcctcagcctcccacagtgctgggattacagacgtgagccatcatgcccggccttgatctcttaattaaaacatcaatttgctggaataacaggatgtatttttcttttatcatgcaggacggagatgagtaaaatctcagtaatcctcttcagggttgacacagcccccttttttaagtatttaagtgcttaaggaatatacaaagatgttgattacaacattattaccaggaaatatggctatcaattagaaccgaaggcttcttctcaaaggttaagactattttcatattgaggtagttcagcagggctggtttcacaagttacagatcacaaggaccccctgataaaacaggatgcggtaaagaggcccggaccaaacctgccaaaacctctgatcatcctcaccgctcattatatgctaattaaaattaattcttgtgctaaaagacgctaccgctaccaccagtgacttgacagttttacaaatgccatggcaacatctatacattaccctgtatggtccgaaacgggaaagagtcctcagttcggggaatcccccacccgctgcccagaaaattcatgagtaattgaatgaataactgttgataaccttcaagtcatgttcaacagtaagcaggcttccaaagcaatccaccttgggagctgtaacccagcctatgctataacaaccataagatgttggttacttattttcttctctgttcttttcttcctccacatgtggtcattgaagtagagggtgttcaccaattcactagtaattgattaacgtcacattctgccccctggaggctgcctgcaagattcatgaacttgttttgcttctgaagaatgaagatcctgaggtcatgcgacctccttggcgatgtccagaagtttgattgacgaagggacgcaaacagctttgatcatgggggaatctcacctcccgccctacccaccttacaaaggaaggtcagattcgagagtttgggtctcccatcctcaggccgtggccaaattgaataaacctttctctgctcctaagcgcccacatgtcagtgcttggcttacagcgtgtcaggtactcaaacctaccctttggggttctgcaacagtcttttgactcgatggtaacattgcgtctccaactaaagaatcttatcataaatttctcaaatgattgatgtactgatcagtgtgtaacctgcagacactaaataggacactgatttcttttaaggtgagctgaagtctgaagttcgactgattgtcttgtgtgtaggcattcttatcctgtatgatgtcatctgtaccccatgatggtgatggtaacctctgtgttgtaccctctaaggaaaggagtccccctccattgttttttgttgttgttgttgttgtttttgagatatatttttgctcatgacacccaggctgtggtactgtggcacaatctcggctcaccgcaacctccacctcctgggttcaagcgattttcctgcctcagcctcccaagtagctgggattacaggcatgcaccaccatgcctggctaatttttttttttttttttttgtatttttagtagcgacagggtttcaccatgttggtcaagttggtctcaaactcctgacctcaggtgatccacccacctcggcctcccaaattgttgggattacaggcatgagccactgcgcccagctcccccttccttcttttaaactttcctaaaaaaaaccttgtgacagactctgaaatacccccaaccttgttggtgtgtcttcctgggtcgatcatcacatttggcttccaataaacctttatcaaattatttctgcctcaatagccttaatttcggtggacactctggactgcttaataaatggtgctggcacaactggctatccatctggaagaaaattgagtcctttttcataccatatgcaaaaataaattccagatggctcagagcttcaatgtaaaaaattaaaatcttagaaaaaaatccagaagacatgtacaaaacagaaattaggaaaatccttataattaaaagagagaatccagagaccttcaacaaaaatatagatctatttgattacataaaatctaaaatgtctgtatgggaaaagatacaaatagacaactaggccaggcatggtggctcacacctgtaatcctaacactttaggaagccaaggcaggcggatcgcttgaggtcaggagtttcagaccagcctggtcaacatggtgataccccatctctactaaaaatacaaaaattagccaggtgtggtggcgtgtgcctgtaatcccagctactcgggaagctgaagcaggagaatcacttgaacccgggaggcagaggttgcaatgagccaagactatcccactacactccagcttgggcaactctgtctcaaaaaaaaaaaaaaaaaatctgcatgtgactttttttttttttaaatagttagggtctcactatgttggccaggctggtctagaactcctgggctcaaataatcctcctgcctcgccctcccaaagatgtgggattacaggcataagccaccatgcctggccttttttcttttctttctttctttctttctttctttttttttttttttgagaaggaatttcactcttgttgcccaggttgaagtgcaatggtgcgatctctgctcaccacaacctctgcctcctgggttcaagcgattctcctgcctcagcctcctgagtatctgggattacaggcatgcgccaccaagcccggctaattttgtatttttagcagagacggggtttctccatgttggtcaggctggtctcaaactcctgacctcaggtgatccactcacctcgccttcccaaagtgctgggattacaggcatgagccaccgcgcccggccctttcttcttttttttttaatgggagaaggagccaatgcaatggctactctttattggaaagaagaaactttgcagcacattttgggtaacttggtgcaggtgctcagtacgtcagctggcggggcaccagcttgtaatgggttccatagctggggcatcactgggtctcgcctttgtgcagcccaaagcaggtgatggtactgttgtcctctacgcagatgcagcccactcttctcttgttggtgatggagaggactaaattagggtcttctttggtgcctgaagctgcctttaggggtagtatattatatgggtccggtcccttccttgcagccatgatgacctccctctccaacgcagttgcctgcttgtcatcagtagtgcgatgctgtttgcagggtaaataaattggaaataaagtgaattcccactggtggatgaatgtgtaatttatggtacattcacaccattgactagtatgcagccaaaatttctacaagaaattattgagaaaagggacagaatgatgtgtataatcatgtgtgatggttaatactaagagtcaacttgatgggattgaaggatgtaaagtactgatcctgggtgtgtctgtaagggtgctgccaaaggagattaacatttgagtcagtgggctgggaaaggcagacccacctttaatctgggtgggcaccatttaatcagctgccagtgaggccagaatataaagcaggcagaataacgtgaaaagtccagactggcttagcctcttagcctacatctttctctcatgctggatgcttcctgccctcgaacatcagactccaagttcttcagctttgggacttggactggctttcttactctttagcttgcagatggactattgtgggaccttgtgattgtgtgagttaatactccttaataaactcccctttagatagatagatagatagatagatagatagatagatcttattagatagatagatagatcgacagatagatagatagatcctattagttctggccctctagagaatcctaatacatcacgtgatgttgtttttataaaacaatgaaaaaacctacatatgctcatgcacaagtacctatgttcctttgaaattctatgatcatggagaatatttcttgtattccaagatcatttacatgagttatctgaagagccgtgtgaagtgggagagaagaaacaagggatgtggggagcagggagcagtaaaccaaaaagaaggccgggcaaggtggctcacatgtataatcccagcactttgggaggctgaggcgggtggaggtcaggagtttgagaccagtctggccaagatggtgaaaccctatctctactaaaaatacaaaaattagccgggtgtggtggtgcacgcctgtaatcccagctactcaggaggctgaggcaggagaattgcttgaacccgggtggtggaggttgcagtgagccaagatggcaccactgcactccagcctgggtgacagagtgagactccgtctcaaaaaaaagaaaagaaagaaagaaaggaagaaagaaaaaagccaaaatgaaataaactgcattcaaaaaaagaaattatacacaatatattttcatttgttcatttaagtgagagagagaaagagattgtgtgtgtgtgtgtgtgcgtgtgtgtaatatagagaaattcttagtggtcagtaaaacaacaacatatttaggtaggatgatgtaaaaagtcaagtcagaggtatttatatacttagaaatgcttttctgctctgccaccaaaaataataataactaagaagaagaatcaattttaggctgggcacagtggctcacgcctgtaatcccagcactttgggaggtagaggttggaggatcgcttgaggccaggagtttgagaccagcctgagcaacatggagagaccgcagctctattttgtaaaagttaaaaataaataaataaatataaagaataaatttcaggggccctctagtggctgcacatcattttcctccactctgacaggtaccccagtagcacctctatgacaaaaagaaacttagtcccggatgccacaaataaacattgttatcatgatttaaagagacacggcctgacgatgaaaggtctccgtttaaatctccttggtttgtgcaactctgtaaagaatcaatcattagattgctcagatcccgccatctcgatcaatctgaaatactgtatttgtgtgtgtctggcctgctagttaagatgtctggagtgttcaaaagaatcagtctagatttataatactagatttataattaatcaaattaataatgtttaaatgcttaaggaaaattgattttcagagttatattacttgaataaattgagcaataaagtaccaatgttaatgagtattcctctccatacacaaaaatatcttgaataaagcaactattaaaaaatctgttttattacttaaaattttttttttttttttgagacggagtctcactctgtcgcccaggctggagtgcagtggcgccatctcggctcactgcaagctcggcctcccgggttcacaccattctcctgcctcagcctcctgagtagctgggactataggcacccgccaccacgcctggctaattttttgtatttttagtagagacagggtttcaccgtgttagccaggattggtcttgatctcctgacctcgtgatccgcccacctcggcctcccaaagtgctgggctaacaggcgtgagccacagcgcccggccatttttacttaaaattaagatcacctgcaagtaactgaagcctcaaagccagaggccaaaaccagacagaagcaggccttctgaggatggccatgcatttgttcaccttacaaccccaggtgaaccggacatgcacagtgtcagctggatgatcagacagacaggggaaaagtgagcccccaaatggacaggtgagaggcataggctcttcctctctggcaaagtgctctccctccagcaaggcagggacgatggcctgcactcccgctggcctgactgccctggcctggccatcaaccggaacctggccctccttctccagaggagacctccccgcatccccccagccacatggcttccttgaaagattcccaccccctgtctgtggtgggcagggacccaaatcccaccacaccctcccaaagtcagaatggacccggtgaggccaggcgagatggctcacacctgtaatcccagcacttgggaggctgaagcgggcagatcgcttgagctcaggagtttgagaccagcccgggcaacatggtgaatccccatctctaccaaaaatacaaaaaactagccagcgtggtggtgggcacctgtagtcccagctacttgggaggctgacgtgggaggatcacctgagcccaggagctcaaggccgcagtgagcgcaaatggtaccactgcactccagcaggggcaaccagagtaatattctgcctcaataaataaataaattaattaataagaacggatccagtgaggtgagaaagcaccgaagccactggaggaggccagcagaggagcacaaggaggaaggaggcagggggtgcaggggcaggcggggctcagagccatcggattccatctaaaaggcagggcccaaaggtgcagtcaagaggaggacagggaggtcctgggggtccgggggtggggcagcttcttccccgctttcccatgggatttattttcaggacagctgggcaatttggggagccgggaaggctgcacctgccccaccccaggccagccgggcggcctccctcccctgctccaccttcttggggtgctgctcttcctctccctctccctctcatggcacccggcccttggggcctgcttcctctgtgcctcctccctctcaggacagtggaagaggcgtccgccttcccctgaccccagcgaccgccgtcccctcctctcccctagtgcctgcattccttcctctttccttctgcagcttttctctcttgccccctcccctccagcttcacaggaactttcccgcgcctgctttccttcgtgctgtatggcttttctttccaggaggcatccggactgaacagtgaagcggccagggatgggggggtgcggagggggtcggggaggggggcgggggagggcagtgaagctgggaggtggacggtgaagcgtgggggactgtgaagcggggcgctgacaggggatctccacgcaatgagctctcccggggcaccggccagaagccacgccttccaggaatggaccacggaccggcctcagatggctagctgtggccacctgcccaggcgagctacagggaagaagacggtggcttccaagtgtgcccccagccttttcagggcctgtaaggtccacggttctcatcatcatgtttaagatgttgtcttcccgctctcatgttctcacaacgaactgcggaattttccagaggctgcatgccatgcaatactgcaacaggtttttacgcaggagatatgataatccacctaactattaagccaaacaaaaaagaggcaacggggcgtgggggggacacggcggggagtaaagcaacgccaactctcctcactgaatctttctgttttggaaaatatatttttcataaaatgtgttacttatgttaataggtaatggcttcaggcccagtgcggtggctcacatctgtaatcccagcactttgggaggctcaggtggatcacctgaggtcgggagtttgagaccagcctggccaacatggcgaaaccccatctctactaaaaacacaaaaattagctgggtgtggtggtgggcacctgtattcccagctactcgggaggctgaggcaggagaatggcttgaatccaggaggcagagtttgcagccgagatcacgccaccgcactccagcctgggcaacagagcaaggctgtctccaaaaaaaaaacaaaacaaaaaccatatatatatatatatatatatatatatatatatatatatatatatatatatatgagaaatttaaaaatatctaattcattaaaaaataatgaagccattacttttttttttttttttttttttggagagagtctcgatcttgtcgcccaggctggagtgcagtggtgggatctcggctcactgcaacctccacctcctgggttcaagtgaatctcctggctcagcctcccaagtagctgggattacaggcgcctgccaccacgcctggctaatttttgtatttttagtagacatggggtttcaccatgttggtcaggctggtctcaaactcttgacctcaggtgatccacctgcctcggcctcccaaagtgatgggattacaggcgtgagccactgcacctggcctctaatatgataaatattgatagctataacccacatacacaaaagctctctggggttcttaacagtttttaagaatgtatatggattcagcaaccaaaaagtttgagaactgctgtagaaggattagtcatgaggtgtctggtgccagatacaggttcaagtctctgctctgctacgtcctagccatgtagccttgagtaactaaccgcagcctctctaaccacttgtctccactcacagaaacaggtgcaacaatagtacctacctcagagagtcgttgtcagcatgcaggtaacaacatacacaagagctatactgagcacgtgtaccagggcaattctgagacttttcttgtttttcgttttttcctttgagacaggatctcactctgtcacctgggctggagtgcaatggcatgatcatagctcactacagtcatgacctcctggactcaagcaatcctcctgcttcagcctcccatgtagctgggactagaggtgccaccacacccagctaattttttctcatttttcatagagacggggtctcgctatgttgcccaggctgctttccaactccaggccttaagtgatccacctgctttggcctcccaaagtgctgggattacaggcttgagccaccacacccagccatgacatgttcttggggattcagaacttgggttaaggcttaaagctaaagacaaagcatgctgagtgccccactttttattttattttattttatttatttattttttgagacagagtctcgttctgttacccaggttggagtacagtgtcaaaatctcggctcactgcaagctccgcctcacaggctcaagtgattctcctgcctcagcctcccaagtagctgggattacaggtgcacgccactatgcctgtctaatttttatatttttagtaaagacggggtttccccaagttggccaggctggtctcaaactccggaccacaggtgatcctcccgcctcggcctcccaaagtgctgggattacaggcatgagccactgcgcccggccctgagtgctccacttcctaaagggagccaccaaggagttgccagcaatcgactagagccagactctacccccagtgcaggaaactaggacgaggcagaatcagccctcatgttaccacctatgagcatacacatgtgcgtgcatgcgtgcgcacacacatacacgagcgtgctataggaaaacagcaagagtgacgccaccttgaagcgtaaccgccaggaggactggtgtctgacccttgcataacaatgtgtcctgcagcaaggtctttaaacaatgcccatcgcacagatgacccctcgtaaagatgcttatccagcctccccagtgctcatgagtcttgacaacaaagtctgaagacatgaccagctacacgtttcaccctaaaagcttgctatataaagaacactttctggagggcggctacggggatctgccatctctcagctgccggagacacggcctctgttcttaagtccccattaaatgtttctttctcagaaactggatttgtcagcctctgtctttggtctcttgcctcccttggtcttgggggcaggcatgcataaatctacccaccaccaaacacaggcacatcgccttcttcctcctctgacccttcccccacccgtggctttatctaccactatgtgcccaggccccagcatctgcatcccagcaagtgtggggtagcactgaggatggtggagtctgggtgagtggcgcatgagggtctttatattgctgcctctacttctgcatgtttgaattttttcataataaaaagtttaggccaggcacagtggctcacgcctgtaatcccagaactttgggaggccaaggtgggtggatcatgaggtcaggagttcaagaccagtctggccaagatggtgaaaccatctctctactaaaaatacaaaaattagccgggcgtggtggcatgcgcctgtaatcccagctactagggaggctcaggcagagaattgcttgaacctgggaggcagaggttgcagtgagccaagatcgtgccactgcactccagcctgggcaacagagcaagactctgtctcaaaaaaaacagggtgggcgcagtggtcacacctgtattcccagcactttgggaggctgaggcgggtggatcacgacgtctgaagttagagactagcctgaccaacatggtaaaaccccgtctctactaaaaatacaggcatggtggtgcgtgcctgtaattccagctactcaggaggctgaggcgggagaatcgcttgaacctggaaggcagaggttgtagtgagccgagatcacgccattgcacttcagcctggatgacagagggagattccgtctcaaaaaaaaaaaaaaaaaaaggctgggcacagtggcttgtgcctgtaatcccagcactttgggagtcccaggcgggtggatcacgaggtcaggagattgaggccatcctggctaacatggtgaaatcccgtccctactaaaaaagatacaaaaaattagctgggtgtggtggcaggcacctgtagtcccagctactcaggaggctgaggcaggagaatggcatgaacccgggaggtggagttgcagtgagctgaaatcgtgccactgcacgattctaccaaatgtgtttttctcccctaagcttcagaactgtttgtgaactgcttgtgggaccactctacctcaacacctgtatcatggactgaatgtctgtgtgtgtgtccaccctctcatcacccaccgcaaattcttatgttgaagccttaggccccagtgtgacgttatttggaggtggggcctttgagaggtctttagatttacttgaggccatgagggtggggcccccatgatggtattagcattcttagaagaaaagaaagagacatcaaagcatcctctctctgccaggtaaagacacagtgagaaggtgaccctcgccagatactgtatctgccggcatcttggtcttggacttcccggcccccagaactgtgagaaatgaatatctgtgttctggtgtatgacactgtgttagagctgcctgtactgccaacccacacacactctgaactcagtgaaaccagcccggccacgccttcctctgccaggtgtttccacttgctcagctctcaccctgccatcctcatctctgcctttagccatggccagggtccagtcttcactttctgcctagtgggtaatttggatgccaggtgggggtgccttggcctctgcatggacccagctgagaagtgcacgaagtcaacacgccagagcagcttcagtaatgggatgggaaggatgggagagtggctatagattcctatccccagttggacggacaatttcgggaggcgtttcgaacccttccccgaaagtccaggtggaatcaaactcctgttcccacagcacccacctcaataatgtgcccttaccctggctttccctcctcccctggccctgtctccactcttgcttcctagaaccccctcccaaataaactacctgcacccaagtccctgccttagactctgttctcatggacgctgcatcagcttgctacggctgccataataagctcccacagaccaggaagcttaaacaacagaaatgtatcctttcacagttgtggaggctgaagtccaggatcaaaggtcagcagggttggttccttctgagcttggagagaaggctctgatgtaggcctctcttcctggcttatggatggcatctctgtcttcacacagtcatctcacagcatgtgtttgtgtccaatatccccctccccccctttttttttttttcgagatggagtctccaggctggagtgcagtggcgatcttggctcactgcaacctccacctcttgggttcaagagattctcctgcctcagcctccagagtagctgtgattataggtgcccggctaatttttgcatttttagtagagacagggtttcaccatataggtcaggctggtctcaaactcctgacctcaggtgatccgctcacctcagcctccccaagtgctgggattataggcatgagccattgtgccaggtcccaggcatattcttgatccctcactttcatcaattcagtggccacatcttgacgcttccaccacctaaacctatccccagtctatctgtttctctttcactgacatgtccacagttgcggccaccatccccttccacctgcatggctacaacagactgtttaactcttctccccaccatcagccctgcctgctccagcctagcctctgtcctgcagcccatgatgcactgaaatgcagacgtgctcccaggacttgcccttggctctgaccacctgtctcaacgttcagatgtgtgtgctaagcttggctgaacacacagtaggtgagcgttagccccatgacagtcctgcgatccggaatctgccgttgcagagacctgcgatgctcacccctccaaggttctggaataaaggactcttggggagaagcagataaaaggtgccagaagcacttccaggcctctgatgacacactacggaccatggtgatggcctcacccagagacacccgcagtttcctgttcccgtcacctcagtgaattctctgtccatctggggtctcagcgaagggaaagacttgtccgagattatggccggtgaccagcagacctgggacctaaaccccaggcattgccaggggctgaagctctttcttcagcacagtggggacaccactgtctggcctctgagctgcagctcagccattgtaacccctgtgacctgcacatatacatccagatggcctgcaggtccattatggcttgttcctgccctgccccaactgatcgacctggtgaccttcttccggacaatgagtattatgatctccccaacaggcaccttgtgaccccctcccctgctgacaatagctaaccacctttcactgtaactttccactgcttaccccagtcctataaaactgccccacccctatctcccttggctgactctttttggactcagcccacttgcacccaagtgaaataaacagccttgttgctcgcacaaagtctgttggtggacggatgcacttgacaaccaccagaaggaataatcaaatgcccaggaattttcttttttttaaatcatctttaatgtatttttaataatttttttgcctcatttaccagataaatcatctaaataaatagatgctatacagtctcttaccaatgtcagtacaaaaataaaaccgcgctctacatccactctgactctcccagcacacacacactcagcaaaggcatgtgcttggaatcaactcgtgcccccgacccctcccagatacattcatttagtctgaacaaagctcgaagctcattctgtgcaaaggaagcgctcttgtgctgagacctggtggccgcagctggccacttcgaaagcaaaagctaaaccacctcacagaagcacagcgcctgcccccagaacaaggggacaggaggagcttggcaacgaggtcatcacccgaacagcagtgacagtcctgcattccaggcggctgtgccaggggtgggggtacctcctccgcaccccccaccacaaaaggaaaagtgcccacgggtctctacattcaaagcgggtgggggctgggggaaagaaaggcagatgggcaaatgctttctaaaccctccccccacccccaagagtactggccttttaagagggctgcgggggtggaggtcactgtctgccttgctctactgggccactctgggctggaaggaggcctgcacggccacagccgtaggtgacctcatagaggtcacctgtcctggaggatggtcctaacggcccacagccttttcccccagggagctggctcactacagcccatgagccacctggctgccctgagctgggcacctcaggcccacccgtcccaggtcacacccctggagttcagctctccctgagccacggagttccccatgggccataaagggctgagtaagaggaaagatgtgtcctgctgctgcagacaaaagcaactgcagcacccacacagaaagccccgtgaatccacagacccacagattgcgcaaatagttctttgaaagtgaccaggaagcaggaaaaaggtcctatgtcccctgggggatggggagcgtgacttctgctggaagctgccagccatgttccaaagtcatgggccaaaacattcaactagagaccccccacaaccctctatcatctttacctccgctgggcacccctctcctggaagagtcccctctgaaccccaagcttccccttcccctccacagggctccacagctggagatgggtggtgattcctgccgctccttgtccagacccaccccacgtattcctctagattccattccctgggctggaggtgaatcaggtcatcccggaggggactgtcccccaatggaagcactgaattgaccgtggacaactaaagatcgaggaggaaggaaagagagactcagggatctgggaagcctgtcaacagagcaccccatgcagaaagggctgcaggctgtctttggtttgggaaccagggaagaagggatttggggaaagaatcaccctctccttgcctcagtagactctgtgacttcctgaggacacagagcagagctgcgaggagggcgggcaggtctcaaacttgctggccgcactccactcttggtgtgtgttaccctgactctgacagccaaggaaagacaggggagccggccttttccatgctccccttgggccccccaatctggttttgtctcccctacaggactggaagagagggagaagtcactcctcactggcagggaagccacgggcccccaggacaccttgtacaaaccagaaaacaagtgcaccttgccaggggtgggctggggcaaagcctgcccatcacacagcacagcctgacctcagagaggcacggcagaggtccctccacaggaatacagctcagccccagctgtggcatttaggttggatggggaggggatgcagaatggaaggaggaaggggcttaggagtcaagggctgccctgagaacgtggtgggacactccctccctccctgactgcccacacctgggttggctgagttggaggggagggcagaaaaagaggggaattggaagggctgaaaagtcacctgagtcagaaagaacaagaacccctcacgggaggaaggacagggtccagacgtctcaaagcctgtgctgatacatcacacaacttagcagacgcctgcacacccgcagcctggcccggtgcagccgagaaaccacatctgtatgcctggagcatggggtgccatcgcacctgtgccagacccctgccctccactgaaagccgcaagcaggtagcaaggtgcatgcaaggtggggtgagtgcaggtgtggtggtgaggtcttttgtgctgtgaatcaccccacgttcgcctggccagggtttctaacccaggttcgcaaggcccatgtggacacgtctgcagccacacatgctttcacggggcacatgggaacgtacacgcgaagggtaatgcgtgcacacctgtgcagccaggtgtgcatgagcgtttctgcacaggccaggtgatgaggggagggcagagctctcagcagaagggtctcagcggcgcctcctccctgggaaggatagaagcctctctgaaggggaagggactcgccccaagtaacctcaacccttcctcctgccccttcctcccgccccactcacttttggtcaaaaccagcctccacagcccaccgcaaagccagagaggagagttcaaggtaaagacccaattgaaacaagagaaaaggggaaaaccagccaaccaggctggggtggccactcaagggagagggtttgggccttccaatgctcctttaactcccagaaccagctgctgcgtcactagaggagaatgataatggtggtgtcccgggcaggtgatcctgtccccatcctgccctgggggtggtaccccaactcccagagcaactctctccatccccagcctgaggcctcgtggtaaacgtccctcagagaaagggcaggtggtgggagagtagtgggatcttctccccttttgctgctcggtatttttttaaataaaataattaccccgcccccaacccatccctatctctggaagtcccaccccaagcccaaaagaaaacagtttaagaagagtaaaaacggtgattcagaacttcccactgcggtctcggaagaagccctcagctgcctgggcctcgcggaaggtgacggtgatggagttggcggtgatgtcggtcacggtcacctcacttgaggggagcgcaggtgtccagggagggggcccctcggccaggtcggcatctgctgcagcgtcagacacacagatgggggcagcgttgacaaggtgggaagccatgcagaccacccaacccgaccccaactccagctcctcctctctgtgtcttcagtcagctcagggcctcacacagggctggacacttgggaggagggcactgggtgcatcctccccacctagacaagagctcagccagagcgggacgacaggaggagccctgggctagtgttgggccctgagcccagacccgactggccccacaaagcactacaggccctctttggacattgaaccagctggaccttatgacccatagggccctttccagctctgagggtctctgggctggggccgccttaccctcctcttcagggggctgcgcagcaggctcccactcgccagccgcctgcaggacgtctggggccggtggctcctgcaggaagagctcccgtcgatggctgtggctctccaggttgggcccgcggggcgggaacttcttgcgcgagagccgcaggtacttgtgggcctttcggggcttgcggagcgggaagggcagggtgggcaccaaggggcccttgtccaccagctcaggtgcccccgccttgaccaccccctcagggctcccgctgccgagtgggcacgtcagggagaagcagagcttctccttgcccttggccttgtgggagctccgcaggtccatgctgtacagccgctgcgggggcaagccagggcagcgcgggtcagccccaccctcccacccgccacacctttgctcatgctgttcctcccacccggaatgcccttcccatgccatgtctacccactcaactccttcccatgccacggctggccatcaccccaccccaccccagcccagagagtgcgccccgggcaaccccagggtcggccagctcagccctgcctctgggccccacagagcactcgcgtcccagcgtttactcctttgatacccagcagagaagcatacaagaaggacaaactgaaaactggccaagagaaacaaatctggatgcattaaggagttagccttcgttttaggaaaggcatctttgcttgccagagcacctccaaaactgacactgccagctcacccgggagatggtgcaggcagagggccaaggtgtgctcttggagttgcttggggcaaagccaggccagcagcacacacagccccggatgcccatgctatccagccaaagggacagggctccacctggcctgcagatgcaccccgacccctccagggggctcctgggctctgtgattgcagcccgctctgctgattgcccgcgacacatctggagctggagggcaagtctgtccacccctggagtttgtaatgtcgggatttatcttatttacttggggagaatttacatgaatctacaaaagattcatggtgccaagatgttgggagactctggatcactgggacagtaccttctcctgccacctgctaccagaggtcaggagctcccaggaagatagtgcagccatcagatgggacctgtgaggtcaaacacctccaagctgagggaagggatgacacacgcaggtcccactcacagtcgtgcctgttaacggcatcacatgtccccaggtgccggctgctgcagtgatgggaggagggctaaactgggaggggactgggaaaatactgcagtgcctgggaggcacatctggtaggcagctgactcaaaacccactcctcccagcgggctcacaggccatcagaagcctagtatgggccaggcacagtggctcacgcctgtaatcccaacactttaggaggccgaggcagctggatcaccagaggtcaggagttcaaggccagcctggccaacatggcgaaaccccatctctactaaaaatacaaaaattagccgggtgtggtggcaggtgcctgtaatcccagctacttgggaggctaaggcaggacaatcatttgaacccagaaggcagagcttgcagtgagcagagatcgcaccactgtattccagcctgggcgacagagcgagactctgtctgggaaaaaaaaaaaaaaaaaaaaagaagcccagtacattctaccattctgcaaggcagggtcttctacgtccttggcaacctcatcacgagagaactacagctactaaagggacgcgggtgccaacagtcaggtcctgggtaagctaccggcctccctgggcctcagtttctttctcagcgaaacaatgaagagactgtaggagccagcctccgaggagggccccaaccacacccacctcctggaattcacacctatgcgccgtccattcccacacccagtgctgtgttgtgtgacttcccaggctagggcataaaagacactgtggcttcttccctgctctctctctcaggtcacccactctgggaagctggtggctgcactgtaaggacactcaagcaaccctctggagaggtccacatggtgaggaccagtccctgtcaacgtccagccctgactcgatggcacgtgagcagccccctcggaggcagatcccgcagccctggtcgagcctgcagatgactgcagcccagccaacaccttgactgcagcccagactagaaccactgaagaaccagctagcacaattccaaattcctgacccccagaagccatgtgaaataatcaatgtttattgctttgagttgccatgttagaggggaagagataacgaacacacctgccctgtaggcttagtatgtggatggagtatattcatctgtgaggcacactgggcagacagcctggcacacagacgtccaggagatgttacttcccttcctaggctcaattcatgccaaacccaatggaacatgcccactgcatgaagggaggcccaccccctctggcgaaagcctccatgggttttaatcaggagtggccaaggacgcttgacatggaccacatacaagtggaccaagaatcctgactttctggcttccaatatcctgcctggtgggtcttattacattaaggagagcgggtattctcttcatacccattttacaggtgaagaggcttacctacaaccacacacaggcagagcattccttatccgaaatgcttggaaccagaagtgtttcagacttcgaatttttttaggattttggaatatttgcattatatatactagctgagcatccccaatccaaaaatctgaaatttagactgctccaatgaacacttcctttgaacatcattttggtgctcaaaatgttttggattctggagcatttcagatcttgtttttcttgttggggtgggggggcggggcggcaggggacggagtttcactcttatcacccaggctggagtgcaatggtatgatcttggctccctgcaacctccacctcccgggctcaagtgactgtcctgtctcagccccctgagtagctgggattacaggtgcccgccaccatccccagctaatttttgtatttttagtagagacaggttttcaccatgttggccaggctggttttgaacttctgacctcaggtgatccacccgcctcggcctcccaaagtgttgggattacaggcatgagccaccgcacatggcagcattttggattttggatcagggagactcaacctgtgactgcactgctccaagatccacgtccctgtcactgcaaagcactgaggtcaggaaaggcccccaagacctacgacgtgggtactccgggatgctgcagagacttgggtccccaactgactgaaggctggaacaggaggcccactcaaaaatgacacacttctaggggtctgacattccaaggctgtagttctacaattctaagattctgtttctggctgggcgcggtggctcacgcctgtaatcccagcactttgggaggccaagccgggcggatcatgaggtcaggagatcgagaccatcctggccaacacggtgaaaccccgtctctgctaaaaatacaaaaatttagccaggcgtggtggcgggcgcctgtagtcccagctactggggaggctgaggcaggagaatggcgtgaacccgggaggtggagcttgcagtgagccaagatcgcgcgccactgcactccagcctgagcgacagagcgagactccgtctcaaaaaaaaaaaaaaaaaaaagattctgtttcttagattctgaaactccagcctctcatgtttcctcaattctcaagtttatgtttctgagattctcagtgataattttgtgtttagggattctgagcatcgaaaggctcaaagctttcagggcttccttacagcaagattctaagctttgagaattctaggattccactggccatatgcctactccccctcccaggtggcaccgcccacccaggctgtcttccccgggcaccagccccacacgcaggcttttcccaattcctcccatcaaaacttacccaagtgccccaccccacagtgccctgggtggtacaggcgaggggacacagatcagctcaatcagccagtgcaaatgcaccaaggggcagagggggacttggggttgggcagggggagaaaggaggcacaaaggcaggctggttacctgcagcagaagccgcttgggtttcggacctctcttcctataccccgatgctcggtctctctcctccctggggtgtgaagcaggtggcagaagaaaaggaaacactggtgacatctaagggaagggaaggcatccgcttcgcccgccctctgctgtctgtcagggaggggacactccccacaggcctgcccaccaatcctccccattgcctggctggggccataacaacggggtcagatgttcaactcccagggccaaggtcttcccatctgacaaacgtggagggcaactgctgaggggggacttgcagcatctccaaaaacagtgggtccttaaggggctccagggccatgtgcgggctctgctctacgtgctcctaaggaccccctaaaaacgtggctcagtttttcctcctaggggagtgatacagaagcctgtcaatccaatttaccttgaatgtcccaggagagctgatgggaatggctagtccctctgcaagtaaagctctgcacagactcccccgaatttgggatctctgtgaacctgggagagcggaccggctcctaccctgtctgtcccatcttgtcgggggacaggatgaaaaccagcctgttctgagtgcccagcagatgccttcccatgtatcaaaaacacaaagcacaactcaggccgggtgcggtggctcacgcctgtaatcccagcagtttgggaggctgaggtgggtggatcacttaagctcaggagtttgagaccagcctgggtgacatggcaaaaccccatttaccagccaggcacggtggctcacgcccgtaatcccagcactttgggaggctgaggcgggcagattacaaggtcaggagatcgagaccatccaggctaacacagtgaaaccctgtctctactaaaaatacaaaaaaattagccgggcatggtggcgggcacctgtagtcccagctactcgggaggctgaggcaggagaatggtgtgaacctgggaggcggagcttgcagtgagccgagatcgcgccactgcactccagcctgggcaacagagcgagactccatctcaaaaaaaaaaaaaaaaaaagaaagaaagaaaaagaaaaaaaaacaaacaaaaaaccccatttaccaaaaatacaaaaattagccaggcacggtggcatacacctgtagtcccaactattcaggaggctgaggcaggagaattgcttgagcctgggaggcagaggttgtagtgagccaagatcgcaccactgcactccagcctgggagacagggtgagaccctgtctcaaaaaacaaaaaaaagcacaacttgacaatgccacgaagctacacatgacacataagacaacacaaccagagactccaaacaactgccaaaagtaatgaggagattcagtcatttcatcctgcctcccacttcagttctttccatccacactctctgcagcccccagtacagaggtcacgtggacaacagaaagaatgtggaggcctcgtgtgaccttgggccaggctcttactctgagcttagcacataccaatgaaccccacggcacctattgcaaatgtctgaccatccactgagcatccatccccagcaggacaccaacggaccaaagggaaagtgtccctggtggaggactagaatccgggcctttgatacctgtccactgctctccttaccacgctccatgggattcccaagtgtcgcaccctgttggaccaaggccccaccacacacctgggaggcagaaagaaaccctgggatggggacaccctgattttaaaaggaaagaacaataaaatttgtcttttgaatccatggcaggaaatctcctggagaaggagccagaagaacccagcagcgaggggcagtggaaaagcccccacctggaggtggcagccctggccaggtccttgctctgggctccaggtaagagcctcagtttccttctctgtcaaacaaaaccctcattcctgcctcaggaggttgccataggggccaaatacaaatgattttgtgaaatggtcccaagccgcacaaggcaggcgggctgggagaggcaggggacctgggctgcctgctggtggggggggcggccagagagggcacacagaactgttagggtgtgcccagcttccctgaggggccctggcagaggtgggagactgtgcctgggccacttggacaggaggtggcagggggacaggccagaactcagaaatcccagccccaaagcccacgctcctgcccagccttccttgagcttcgtcagacactccttcctgccctaagaggtcctctagagacaccgtctctgatctgtcacccccgcacaactggcagtgccgcctcctagcacacagggcatctttgtgaagcattttaacattcttcactggaacagaaacctcttacggcccctctgaggtttcaccctgggaaatgggtgtactcttcagggtggcccatttgacagcagagagactgaggcccgggtgggtaaaggaagtgaccgagatcacccaacaacaggaaagggccccagggtcctcagctgccctgggactcagtgcccaccattttcacccagctgcaggctgggctggcctgccccatcggacacccctgccctgccccaacaacccctgccaagccagcagcaggctcctgggaagcctctgagccggccctaagccccacccggcggtgccgaggacaccgtacttctcctcgtaggccatgacgaggcgggggtccaagatgtgctcttctggctcccacgtgctgtacctggggagaggaatgaaaggtcagagttggggctgggcgcggtggctcatgcctgtaatcccagcactttgggaggccgaggcgggcaaatcacctgaggtcaggagttcaagaccagcctggccaacatggcaaaaccccatctctactaaaaatacaaaaattagccgggcgtggtggtgcatgcctgtaatcccagctactcaggaggctgagacaggagaattgcttgaacccaagaggcagacgttgcagtgagccaagatgacaccattgcactccagcctgggtgacagagtaagactctaaaaaaaaaaaaaaaaggtcagagccatcgcttctactgggcaggtgcaccagcagaggccactgctgctgacccagtgcccactgcaagtgtgccttcaccctgtcctggtaaggtgtcattgtcacctacttcaaggacagacccagcctgggcctcctgagggctccagcaacaccagagttgtcctggttcatatcactctacaatgtgactgggtccaactccttgttagactccacaatcactagagaccctcgggtgccaggaggagagagggcgcctgtaagccccacaccaggcaagagaggatgaaaaggagccagggctctggggacaggctcacggcctgggttcaagtccatctctgcccctagctagctgtgcgaccttgagcaacttcctgaacagctctgtgcctcaatgtccccctctgtaaaggactcttgtgctgatgagatgtgtattccaagtgtttagagggtgttacaagagtaacagcgtgcctgatgtgtcgtcagcgcactgtgtttgctgctgttgctgttcctccccgccctccaaaccccatccccatccccagcatagtctccctcttcagtgcaccccacccaggccacagccaggtctgaagttcccttgtctctgggcctggtacacagcaggtatttggtaaatgtctagtggctgaatggttcagcaggcctagcgcaggcccccgggtaatgctacaggggatcttctaccctcgccacccagccagggagcaccctcctgctggggcagaccctgtgatgtcagcgcagcggctccagagctcacctatctgtggaaccaccgtggtgacacccaccacaccctcgttccactagcactcctgtttacttcgtatctgcctttagaggagcttttttggtttaaattattttaaaagcaaactatgacttccataaatggaaaaaccagtatcactcaccatcgacgcaaacataaaaacttttccattaaaaacaatatatgtacagtcaagtgccgaataacatttctgtccgtgacggcctgcgcatgtaatggtggacccataaaattacaacggaactgaaaaattcctgtcatctagtgacgtcttgatgatcctgaccctgtgtaggcctaggccaatgtgtgtgtttgtgtcttaggtttcaaaaacaaagctttaaggccagtgtcttaggttttaaaaacaaagctttaaggctgggcacagtggctcacgcctgtaattccagcactttgggtggccagatcacttgaggtcaggagtttgagacaagcctggccaacgtggagaaaccccatctctactaaaaatacaaaaattagccagacatgctggcgggcgcctgtaatcccagctactcgggaggctgaggtgggagaatcgcttgaacctgggaggcagaggttgcagtgagccgagatcgtaccactgcactccatcctggatggcagagcaagactccagctcaaaaacaatgaaaataaaaatataaattttattttaaaattaaaaaaaactttaaaagtaaaataaattaaacttttttaaatagaagaaagcttatagaatataaaacaaatattttgtacagccatacatgtttatgttttaagctaagtgttactacaaaaagagacaaaaaggtttaaaaagttaagtttataaagtaagaaagttactataagctcaggttaatttattactgaagaaaaatatttctgtataaattagtgtagcctaagtgttcaatgtgaaaaatatttctgcataagttagtgtagcgtaagtgtacaatgttgacaatagaccaggtcttcatattccactcatcgacagtgagtgacatgtgtctgggtgacagagcaacttccagccccgcaatctctgtgcctgggaagtgctctagaaggtgtcccaggttttatcttttacactgtattcttactgcaccttttctacgtttggatgtattcagtagtcacacgctgtgcatgcttgtagcctgggagcagcagactctattacacagcccaggcgtgcagtgggttgtaccatctaggtgtgcctaaggtcactctgatgttcgtacaatgaaatcacctaacaatgcatttctcaaaatgtatccttgtcattaaccgacgtgtgactgtgtataaaacatacagacaaaagcaaagcgatgccctatggtcctggccagaggctctgctaggtaagacggaaggcaatgggcgttagcgaggggttaaaaggcagaaagagcctgggagagcccctgccctgccgcctcccaatccctagagctgaggcctctaccttacagtatcccgggaactacctaacgctagttcagtcccaaaatgctgcccaacgacagaatgctcgcctccttgcttcctctaacactctggcacacccacttggtgtcgggcctctatgggctcgcagtgaagccctgagcctgggctgccccttcccatgtgccccctgccagccggccctccctccctttgggtgccccatccctccagtcaactcctagccgacccttaagagtcaggtatttgtagccttccctgacatccctcccaggctgtcccactgccagcaggacgagcctgcccctcctccaccctccttacagctatacctagccttggccataatcactaatggaccaggaaacaccctggcgcgcagagccaccgcaaagtggcccgctcaggcccgcccggggctctgggaagggctggggagcccctgcagaatgccgaaagcgaaactacagcagaagccacgagaggctggcagacactctaacccttcctccccccggaaaaggctgaatctcctcactctaactggtaggaaggggaatttcgtgctcctctctccacagcgtgctcctccacaccgccctgcccattgcttgctgatgtccctgctgtgtggatcctggcaggtcccaacccttctctgaacttcagtttcctcatctcaagaataatgaccactacagtaacagcaggtgtgcggccgggaccgccaggaccgcacccatcctcaaaaggcgctggcgaggtaggtgcttagttcttacccccattttacagatggagaaactgagacacggaggttgggcagccagcccagcgtcactgagccagtcagtggccggcccgtgttggctctcggccacactccgccttcaggctcctcccaggccaccgcgtctgggacccccgactgtgcagcccgcgggagggggcgtcgccccctctccagtcctcagtgtccgaccgcagggcgcggcgcacagtgagcgccccgaaaggctcggctggatgcagaaggggtggttgccggcccgggcagctgggtctgagataacagggtcgcacttggctgccgagtgcagccccaagtggggggcaggggcggcaccagcatcttaattgtttggacccagccggtaaggaggacgccgcgccgcaccgcgccgcgccctccgcagtgcaggagcccagaggcgccaaggggaacgcgcttccgaagagccgggcgctggcaacccaggagcgcgccactagcgtgggcgccgcggatcgaagggattagaccccacgaccatcggagaccctcgggtgcctggaggaaagcgggctcccgcaagtcccaggacacccttcccacaccaggggagggagagtggaaaggagccagggctctggggacacgctcgttgcctgggctgcgcggaccgcggcgtggacaccgggggactgcgggggtctgcactgggctcgcggcgccggcggggcgggaaccgatcaccccgtgggagggggcggagcgccaggccccgcccccgccggccgcgcgcacgcacgcacggggaggggcgcgcgccgggattaccggcaaaccgagggggcgggggcgggggcggggacagggacggcgcgcgccggctccgagataaacacggccacgtgacctccccgccccgccccacggccgggtaaacaagccccggccgcccagccaaagccccgccgcgcagggctcgccctgctgcggtgagggcacgcagtgggaaggggcgcagcgggtgcaggacccccgccggcctttcccggggggtcgggggaagcggggtttggaggcgctgctgagctgtgacgcaggcggccttggggcaggtggaaccacccggaaccccgcagagccaggccaacccccaagccccagtccccactccgatttaaagctgctgcacagaagacacagcacgggctctggtccagactgcggggtgcggcctcgttcaggagacgccaccgctctggggcctcatcctaaagtgggcccaccagtaaccccagtcgtatagggctgtagtgaagattagatgtgttaagccacggaaagcatttcgatcagtgtggtacacagtgaaggcaaataagcctgagttaaatcaatgaaaagcccagggagcgtaaaagtctgcggctcctaactccagtctccccagcctgggtggagacagctcccactctgcccctggcagggtgttaatgaatcttgtcttgtctcaggcaatcttcagcagggccctgtgaggttagggcctcatttttataggtggggaaagtgaggcacagagaggttgagggctttgccctgggtcacacagctgtaaaccttcagaggtggaaagcctcagcacttctcactgaactggccaaaaggccagcaggcaagagtcctagtcatctctagtggagttgcctgtgtatcaggcagcccgtagttcacatctgcccagctctatgaccctgggcaaggcctcatttgctgtaggcttctgtctctccatctgtaaaatgggttgctatgagtggttcaaagagtcaatgcctgattcataataggggcttattgacagcctggccatggctgtgaccactgacatcattcctaaaactccatagggccactccttccaaaacgatggagaaccattcacaagtggggaagagaggaagtcattctggaagggggaacagcagggccctggacaggctgaaatgttatctggaggcctcaggcacagctggcacctgtacctgataatgtcacattccctgtcccgggccccgagcccctccctgtgccatttgctgtgctttccagaagaagcaagagagcccctctgccacacttgtttgctggggagataaaacaggcaaggcatgtagtggtttagcctaggcctggcacaaagtgtccactttttttttttttttttttttttttttttttgtgggggacggcgtctcactgtgttgcccaggctggagtgcagtggcacgattctcctgtctcagcctcccaagtagctgggattacaggcgcacatcaccatgcctggctaattttttatgcttttggtagagacggggtttttgccatgttggccaggctggtctggaactcctgacctcaagtgatccgcccacctcagtctcccaaaatgctgggattacgggcatgaaccaccatgcccatcctagagtgtccatttaaatcatggttcctgttactgttactgagaagaatgtaagtctccccacctacagggcagatgctgagcaggagaatcactaccccacccaggccggcactgcccagccaaggctcccaggcctggaggacacagcctgcctaactccccaccccccaccctctttctcagctttttctccaagcagggcccccgaggaggggaagacagagctggctcccctgcttctcccccagagtgaacctctgtttcccccaagtgaggtggggatggttagcagccatacctgcctcactcccagaccgtggtggcactgtggatggcatgaagtgggcaccacagtgcatggggttggcagttatatttttttaaggaccaaccctctctgggcctcagtttccccatctgaaaaatcagaggactggcctaaatgatttctaaggatactttgcactcctgagaagaatggaatcccttaggtccctttcctgactggggaaaacaaaaagaacagctaggctatctatctaacttaatcttaaaaccaaatgtttactaaagcacttggactgggctgaacatgcattcgctcaattacatccaccctctcaccctcacagtagcctgcaaaggaggcttcaccatctcaactcgaagatgaggaagcagagacccagccatggtggggccctgtcccagggctcatgcctgtcgggtgggcagccaggcctagaacccaggaccaaagtggaggggggtgagaagaggcagccatgagggcccatctggtggcctcagcatgttaagaaacaaatgggtccccaggctaggggcacagcgcaacagaagcatcgagggcctctgctctgggagcctcgttccttccctcctgacgagctgcagtgggcagatggattcacatccaggatcaatcaaagtgggggaaggaacttttcattcataacggcctctgtttacagaagagaatcttccaaagagtggagtctccagaggaggaaaaatagccaatagtgtcctgaaggctaacagctggtggccacagcttcctggtgcgaagcgagagaggcaggggtgtgcgcgcccagggaggcggtgctcctgctgcccactctgggcatcgtcactccctttactgcccccttcactcaggctggaagcccaccttctagcagctgggtgtggcgggggagggattctccttcagccctcagaatattcgggaagggagaactgaagtgggggttggtgtgaggggtggagtgtattctcggcctgccagctcccaacccctgtcatcaggatatccacaggtcacccagaacatgtgcccaggcctttcatccgatagggccaccaagcctgtgagatgagtgcagggcctgggtttctgaacccattttgcagagagggaagctgaggcactgtgggctgtcttcctctctgctgtctctccccaccatcaccccagaatgcccacaggaccccataccaggtcagcccccaccagcacagcaaaaagtccctgcccgacagcagcagctctgggcagagggggtttccaggactcagtctccgggaggcggggcagggggtggggcacccacagaccaatggggaggccccacgactagctcattccctcccaacaactccctgctggagggcattggtgggttcctgatggggcctcagcaggagaggtggagaagctgggaggtctcagatacagctccctgcctcccaactccgagatgggaggctgggaaggcacagaggagacacctgaaaaggagaaggcctagttcaagtcccaactctgcctccacttgctgtgtgacctaaggcaagctgcttaccctctctgagcctgtttcctcaccttgagagcgcctgatcacacctaccttacaaagctgtatgggaacctgctctatagactggaaagtgccgtctagaggtgagggggattcaggctctgcccctggccacacagcactgaggactcatgcagcactgtgcttaaagcagctggggtcccctcctcctgtccagcagccatctccagtagcccggatgctgggccttcacctcccagttgccaagaaaagccacagggaggggaggagggagagcagaagctccaactagcagaggagctcaacactcaggagggcagggtgagaagagaagctggagacccaccttgaccctcctgtggtccagggggaaactgaggcccagagaagatgatgattaaatcaaggtcagctgtccagttacaagagtagctggagctaaaagctaggcaggggagggggcaaaaggcaggtggaggaatgcatgggtcggtaggcagacagacagacacacacacatgaaggagcttactttgggggccatcctttccacttcaccagatactcgactttaccctgagaagagagagaagcagacacagtgagtctcgtggttgcccctacagccactcggaaggacagttaaggcccaaaggagcccagctccaaatcccatctgcagacaggtgtctccccaacacacaaacacaatccggggactgtccaccagatcctcgccaacccatataaccgcgactgctgcatgcccgccccatactgccctccctaggacagcacaggagtgcgtctggctccagccacctctgaggctcctgaggcccaagcccagggctcatgtcacacactgggagctgagactgcatggaggtgtgcatgcgtggccaaagacccacagtgtctagagccccagtgcacaggtgggaacgcttactttcttttttagattggaagagtctccaaatacgaaaacattcctctctggggtagtccccacgctcctcccccatctgctgagtcccctttcagtctgtgagtggctgcctctggctcagaggtaatgggccagtgacttgaggactctcaactcaaaagaccctggcaggaccccatggaagactggcaaagtctccaccttcagaaggggtggtcagccctgtggttgttagaaagtagagccaggcccctcccttcctcacaggctttaaaagtttacagttacggtggctcaagcctgtcatcccaacactttggaaggctgaggctggaagatcgcttgagcccaggaaggagtttgagacaagcctgggcaacacggtgagacccctgtctctgaaaaaaggaaattagttgggcatggtggcacttgtctgtggtcccagctacacaggaggctgaggcaggaggatcgtttgagccggggaggttgaggctgcagtgagccatgttcatgcccctgcactgcagcctgggtgacagagtgagatcttggtgccaagaaaaaaaaaagtttacagtccaaccccattgtgagtgaagcccctgcacgccagaactttaagaccaaaatatgatacctcctcacagaggctttccctggtgaccctctcccatgctgtctccactggcaccttgcagttctatttctgcagagcacacagctccatctgaaggcatctgtctgtatctcctcattcactgtgtgccgcctctgcagaatgccagctccctgagggaaggggtggatccctggggcttagactggtgcctggtacctgaccaaccctcaataaatattttgagtgactggccgaaggaatgatgatctcgccctcttgtgctaccctgcgggctccatcgtagagggagttagtgctgtgcctgcttcaggctacacagcacgaaaagcactgagctttgtggaataaatcaattctcttttaagtggagaaaaccctaggaaaaaggagaaggaggaggaacagctgcctcaatcagaagagtaaaaccccaagcacagctggaggaagaaaagatgctcctgaccaccttgaccttcacccttggcccgagatgccaggactgagttttctctatggagaaagaagatgggctgccaatcagcccagttgagctcctgctctacctccctatctaacttgctcggtgaccttgagcaggtcacttcctctgcctgggcctcagtttttgtctctgttaaatgggaggaggtgaccccctaaggcccctcccagtcggcctggagcctcccaaagggctgcagggaggaggagacaaaggaaggacagtagtgcgtaccaggaaaggaacttctccccaaggatttccccagccttaggcgagccccctcgccaaacaagtgcacgggaggtgtagacgccaggcccggacaaagtctagccccaaagtgtggggttctgaaaccagcagaacagacacctccttaaattgcagggtgtatgttttgaagaaggcagatggggtaggagactaggggatgccccagcgcagggggcgggcttcagagccctggcctgggctaggagttgaggtgggggtgggggcggggaatagggatgtgctcgggtggcgtagagggggcaggatcggaaaaggccaaagtccagcaggaaaaacttcagaggccggaggagacttttccaaagctccacttacaacttgaaaggatttggtgccaagcgtccagagtcccgagttcaaaacccagctctgaccataacgcgctaggcaagtcctttcaacttgggcctcagtctccccatatttacaataaaaggggagcgaggtgggatggcgctgaggatccctacgtccgatcctaatctccagctcaggcaggctcggccgccactagcatcctggagcgacaacttttgttctactcgccctacacggtggcagggaaactgaggcacgggctggggagacgggcccagcagcgcagggctgccggggcccccgcgccccgctttccccttcagccccagcgtggagggagcggtgctggggacgggagggaccccactggggtcctgggagccgcccccgggcagcctcaccttccgcacgcgcttcttccggatgctctccacggcgaacacctgctcgccgatggctgacagctccatgcggggcggcgggcgagcgggcccggggccgggccgggccgggggcggagctgcggggccgcggctgcggcgcgcgatgctggggctggcggggtccccgtcaccctcgtccgggcgcgcacgcgcacgcgcacgcgcgcacaccccctcgcgctccctcacgccgccgacgttccatttttgaacctgcgcaacgttttcctcggcgccagcgagcgagcgcgcgcaaggagggggcggggcgggagcgcgcggaacggccgcgggctcggctcgcgccctgagggtcagctccgcccccgagccccgcccccatcggaaccccgcccccggggcccgcccccgcgggttgcgattgggccgcgggccgcgagccgcgagcgctgccgtgggacttatttggctcggtcaccggctggggcggggcggaggctcgcgcgccccgtcttgctgtgacgccggggcgggacgtgatccttaatacccaggcgggcgcctcatagcctcccggtgactgccaggggccgaagtggcagggcccagtggagccgacgacaaagtcaaggctcagagcggggaggccatttgctcacctcccgcagcggaggagactgggcccgaggcgcagcccctcgagttgcaggagagccgggacccaaaaggcttcccaccgtgtccggacgtcgcagggccgaggtctccctaatccggccttctccgcggcgcagtttggccagtgtctccacgtccgtccacccacccctccatccgcccttccatttgtccatccacccgaccctcggtggtcggtgcccagacgcacgggtcagacgcgggcgctgcctcgagggctcccgggccgggccctcgttcgcggcaggagcggccgcggtggagctgaggtcccccggggacggattttgccgccgcgctgccccagccttccccaaacccgcgtgtactgggcgctaggtgcttagtgggggctcaaccatttgtggcacgagacgaactcttgattccccaccccccttcctttttcgctaacgcgcctccattcctcactgggagcccggcgtcgtccctgctccttcctgtactgaccccaacttctgtcgctccggcatcccctcggggactcgggtctgcctgccctcaccgcacccacctcccaggttcgccccgtcttttctctggaccacagcagagacctcgcggagctgccctccctccgatctcagccacacagtgccagagtgtgcttctaaaatgcagatctgacggggtcaccctgtgcttaaaaattttcctccctatttccctcacaataaaatccaacacctctttctggcacatagaaaaagagaataatagattcacacctgacttttcatcaagagcaacaaagccagagagaaaataaccatcatcttagaattatatattcagtgaaaatgtatttcaagaattatgtacccagtatgaggcacatgtatccagaacgtaggtgaaatcatagcacttacaaatacaaaaacttaagagtttgccactggtagaccctccggagggagattccaaagctggaacttcaggcaggaaaaagatgatcccagacggaggtctgatgcaactgggaataaagaaaaatgaagaacagcgatagtgtgaaacaataacaatgacttctggataaaaacagatttaaaatacacaacagtgatggcatttacttgggtgaatggagttaaagtgttctaagatccttatattcttcaggaggaaggtgaagatagataccaaatacactttgacgaatttaagaatccagattgtcattactgggataaacactgtaggactggaaatactgtgtatagttatccaaattattggaggaggaaaaagaatgattaaaccaacccaaacaactgtaaagcaggcaagaatggagagaaaaataaatacaagacggggcagggaggggacaaatagacgatagctataaattcgaatattttgtgattcaataaatgcaactaaatattgcagttaaaatacaaagattatcagaatgcataaatagctagatgcagtttacaagagaaacccacaagagacacttccaaaacataaagctagtgatggtcaaaagtaaacacatggggggaaaataccacgcaaatgctaacgaaaagaaggctggtgcagttattttaatatcgagggaaaaacatcactagagataaataaggtcatttcataatgaaaagtgtccaattcaccagaaaaatagaacaatttcacatttgtatgcaaatcatcttaaaatataagaaacatgaagaagacagctagatggagagatagacaaatccacaattatagtgggagatcttaacactcacccctccataagtggtaggagaagaagaaaaatattcaatagtatataggagatttgaacacaattaataaacttaactaatggacttcatagcacactgttatctaccatggtaaaatactcccctttacaagacatggaatacttacaaaaacagttcatttcaataaatttcaaaagtcagaaataacagaatacattctctgaccacaacacatataagctagagatgaataataaaaagttcacttcaaaagccccatatgtttggaaagtaagaagtatgggtttttttgtttttgtttttcattatatttatttatttattttgagacagagttttgctctttcacccaggctgaagtgaagtggcacgatcttggctcactacaacctctgcctcccaggttcccaagtagctgggattataggcacccgccaccacccccagctaatttttgtctttttagtagaggtggggtttcaccatgttggccaggttggtctcgaactcctgacctcaggtgattcaaccatcttggcctcccaaaatgctacaattacaggcatgagccacggaagaggtacgtttttatgttaactagcggttcaaaaaaaagaaattgtaatggaaattataaaatatttttaactgctcttccgctgtcgccgtgggaatggaaatctgtccctcgtgctggaagccaaccagtggtgatgactctgtgtgccactccgcctcctacagcgcggatcctctgcgtgtgtcctcgcaagacaagctcgatgaaatggccgagtccagtcaagcaaactttgagggaaattttgagtcgctggaccttgtggaatttgctaagaaacagccatggtggtgtaagctgttcaggcaggaatctggaccttccccgaaaagtgaagggtggcaacccagccgttcattgggggtgtcactgaatggtgcacgggtttcatatcccagaaggttggaaagttggctgtaacagttgtgggaggtgttttgtttttttctccttcagcttgcaaatcatactgggtacatcaaagttgactggcaacgagtggagaaagatataaagaaagccaaagagctgctgaagatcccttaagagcaatcagatacctaccaaggtcaggagcaaagctgaggaggtggtgtcgtttgtgaagaatgttctagtgactgggggatttttcggaggctttctgtttggcatggcatcctaaggaagatgaccttattttcattgttcttgttttttttccatccagcagtctctacactccatcataggacatcaagtctctcctcttctcctgtgccttcctccctgctgtagcaaatccgagtggcttctataagcatctcttggtacaagttaatgtggcccttggccaagtgcggtggctcatgcctgtaatcctagcaatttgggaggccgaggcgggtggattgccggagcttaggagtttgagaccagcctaggcaatatgatgaaaccccatctctactaaaatacaaaaaaaaaaaaaattagccagacgtggtggcaggcacctataatcccagctacttgggagactgaggcaggagagttgcttgaacccgggaggcggaggttgcagtgagctgagatcgcgccactgcactccagcctgggtgacagagtgagactccgtctccaaaaaaaaaaaaaaagttaatgtggccctaccatgagcttgatggtggcagaagaggcaatagttgttaggtctcctcccatacaccccgtatgtggccaatctgtaggtcagcaagaaggttccttttcccccatgcaagacacttaccagatcacattgcaagatgactcgccatggaggatgagcagaccctgaaaggttgtctcaaactgttgatttggaaaagaaataagcacatagataaacttattgtgtgctgcatggaaaggaactgaatacatttgcctttaagcatgaaaaaaatatttttaactgaatgacaatagaaatattacatagtaaaaatgttgggctatggctagtgcgcttcttagagggaagtttattgccttttgtgcttatattagtaaagagaaaaggctgagagtaatgaacaagcgctcgtttcaagaagctagaaaaagagcagcagaataaaccaaagaaaatgaaaggaaggcaagagtaaaggtacaggagaaaataggccaggcacagtggctcacgcctgtaatcccaacactttcggaggccaaggcagacgtatcacctgaggtcagaagtttaagaccagcctgggcaacatggcaaaattccatctctactaaaaatataaaaatgagcaggcttggtggctcgtgcctgtactcccagctagtcaggaggctgaggcaggagaattgcttgaaccctggaggcggaggttgcagtgagcctatatcatgccactgcactccagcctgggcaacagagtgagactccatctcaaaaaaaaaaaaaaaaaaaaagaaagaaagaaaaaagaagaagaagaaatggtaaagagaaaataatgaaatgggatcagcaaaaccaaacattatttctgtgaaaagactaatggcatggacgactcctgttgaaattgatcaagaaaaaagagagaaaacacaattaactaatatcagtaattaaaagttacagaacctgtagacattttaaaaaggaaaataaaagaggatattatgaatagtctcattacaatagcgtaaaaatttgaatgaaaggggcaagttcctaggaaaatatgccttaccaaaatggtcgcaagatgaagagaaaacccgaatgagtaccatccctagtcatagtaccaaattatgaaatactttcatagccagttactgaccatttgaaacactttccagccttcacatggagcagggtccagaaggctgtccaggcagtaattccgtgatttatgtgacatcagaaggtctgggggatctggggcatccctggaagagtcattgcacttaggaggttgatcgtagcggctacataccaattggtatgaaattattttggaatttgagcaacctgaagtcctatggcaccagctggacatcagacctccccataatgattaaaggaaggaaaccggtaatgcttccacaaagaaagctcagacccagaagacttcacctataagctcttgaaagaactcattccaatgctacccccaacttttccacataatagaaaaagagagactgcttcccaattcttcatatggcaagtacagcacaagagaaaattacaggccaatgtcacttatgaatatagataccaaaatcctaaataaaacagcaaatcaaattgagcagtatgtaaaaatgatactacatagtggtaaaattgggtctaatccagaaatgcaaggttggtttaacatttgaaaaccagtcaatataatttgcctcattaaaaaatgaaaggagaattagccaggcatggtggcgggtgcctataatcccagctgctccggaggctgaggcaggagaatcgcttgaacccgggaggtggatgttggagtgagccaaggtcgtgtcgttgtactccagcctgggcaactagagcaaactccactcaaaaaaaaaaaaaaaaaattaaaggaggaagacatgtgatcatctcagtatatgcagaaatagttcaacatctgtttgttttaaaacttgtagcaaactatcaacacaagggaatgtctttatcctggtagagggctctataaaaaacctacagcaaatatcttaatgaatgttgaaatgtggaaaacatccccttgagatcagttacaaggcaagattggatgaatccccatttctgctaaacatcacactggatatcctgaatctgttgcccactgtggtggccattggccaaatgtgactgtcaagcatttgaaatgtgactagttcgaactcagacagaagaataaaattagatacaggccagatttcaaagatttagtacccaaaacatgtaaaatgcctcattaataagttgatatttatttaatatggaaatgataatattttgatacattaggttaaacaaaaaattcatcttttttttttttttgagacggagttttactcttcttgcccaggctggagtgcaatggcgtgatctcaggtcactgcaacctccgcctcccaggttcaagcgattctcctgcctcagcctcctgagtagctgggattgcaggcatgcaccaccatgcctagctaattttgtatttttagaagagatggggttttgccatgttggtcaggctggtctcgaactgctgacctcaggtgatccgctcgccttggcctcccaaagtgttgggattataggcgtgagccaccgcgcctggcctataaattaatttttaatgaagattttagaaaattttaaattacagttgatccttgaacaacacaggtatgaactatgtgggtccacttattcatgagtcttcttccacctctgggaggtggcaagacagcaagacccacccctccttttcctcctcctcctcagcctacaaagcatgaagagatgaagacctttatgatgatccacttccacttaatgaagagtaaatatattttctcttccttatgattttcttaataacattttcttttgtctggcttactttatggtaagaatacaatatataatgcatgtagcatataaaatatgcgttcattgactgtttatgttataggtaaggcttccaatcaacagtagattattagtagttaagttttgggagagtcaaaagttatatgaggccaggtgcagtggctcactcatgtaatgccagcactttgagaggccaaggtaggtgaatcaccttaggtcaggagcttaagaccaccctggtcaacatggtgaaaccccatctctactgaaaatacaaaaattagccaggtgtggtggtgggcacttgtaatcccagctgctggagaggctgaggcaggagaattgcttgaactcaggaggcagaggttgtagtgagctgagatggcaccactgcactccagcctgagtgacacagaaagacggtctcaaaaaaaaaaaaaaaaaaaaaaaaaaaaagacaacaaatgaaagaaaggtgaagtgatttgaaataagaccatcagccagtcgtggtggctcatgcctgtaatcccagcactttaggaggccttcaatagcttataggtgaagtcttctgggaggctgaggtgggcggatcacaaggtcaggagtttgagaccagcctggtcaacatagtgaaatcccgtctctactaaaaatacaaaaattagtcgggcgtggtggcttgcacctgtagtccgagctattcgggaggctgaggcaggggaattgcttgaacctgggaggcggaggttgcagtgagcaaagatcgcaccaatacactccagcctgagctacagagtgagactctgtctcaaaaaagaaagaaagaaagaagaccatcattattttcagattttatgtagaaaattttaaaaatcttcagaatatttattataattaataagaaaatttagcaaattgttggataaaatatcaacagacaaaaacctattgtgttttgtgtttccatatgccagtaataattagaaaatgaagtaaaatattatttatattataataaaaatatgtaagatatctgggaataaatctaatgaaaatatgcaaggcccttatggaataaaatcataaaattatattgcaagacattaaagaagatctaaatttatttttttggccgggcacggtggctcacacctgtgatcccagcactttgggaggccaaggcgggaggatcacttgaggtcaggatttcgagaccagcctggccaacatggcaaaactccatctctgctaaaaatacaaaatttagtcaggcatggtggcatgtagctatctatgatcccagctattctagaagctaaggtaggaggatcgcttgagcctgggaggttcaggctccactgcactccagcctgggtgacagagcgagactgtttaaaacaaaaaacaaacaaaaaaaaacaacaacaagacataaagctatagcaaataaaacaatgtcctattgttcaagactagacaaatagaaaaaaaggaatgacaatgagagcttagtcaaagagagaaggagagagagagaataaaattgcagtcactgggtaaaggatacacttttcaataaatggtgatagttattcatacaggaaattagaccattagacctcctgcctggcaaaaattgactccatctgacttcaaatcctaaatgtgaaagacaaaattctgaaacttttagaagatgatattttaaaatatctttatctttatgatcatgaagtagggaatcgtttcttaaacaagaaaccaggaacataattcatataggaaacaattgataacttagactccattaaaactatgagctttctttatgaaaatacatataaagtcagccagcgacttgaaaagctgaggcaggagaaccgcttgaacctgtggggtggaggttgcagtgagctgagatcgtgccactgcactccagcctgggtgacagagtgagaccctgtcttaaaaaaacaaggccaggagcggtggctcatgcctataatctcagcactttgggaggctgaggtgtgtggatcacctgagttcaggagttcgagacccgcctggccagactggccaacatggtgaaaccccgtttctactaaaaatacaaaaaattaccggccgtggtggtgggtgcctgtaatcccaggtactcagaagaatcgcttgaacctgggaggcggaggttgcagtgagccgagattgcaccactgtactccagcctgggcaacaagagtgaaattccatttccaaaccaacaaacaacaaaacaaaaagagccaggcgcggtggctcacacctgtaatcccagcactttgggaggctgaggcgggcagatcacctgaggtcaggagttcaaaccagcctggccaacatgacaaaactccatctctactaaaaactacaaaaattagccaggcgtggtggcaggcacctgtaattctagctgcacgggaggctgaggcagggttgaacccaggaggcagaggttgtagtgagctgaggtggcaccactgcactccagtctgggcgacaacgtgagactccgtctcaaaaaaaaaaagaaaagaaaagaagaaaatatatataaagtgaacagaaaagaaaaatatttaaaacactcataaatggacaaaggaggtgatgtaaagagttcctgtgaatcaagtgggaagatggacaatcagttgtagcaaaatacaggagtgcagaatgtggcaaagacttggacaggcaaagagaggaatcaccagtggccaacagttgtgaaaagttgttcaagctcatgagtaacgcaaataaaatcccacaatgagatacgactgattaacaaaaatgttaaagtccgttttaaaaattattgcaagcaggctaggtgtggtggctcacgcctgtaaacccaatactctgggaggctgaggtgggaggattgcttgagcccaggagttcgagatcagcttgtgcaatatagcaagacccttgtctctacaaaaaaatcagaaattagccaggtgtggtggtgcatgcctgtactctgagctactcaggaggctgaggtgggaggatcacttgagcccaggagttcaaggctgcagtgagatatgatcacgccactgcactccagcctgggtgacagcgagagaccgttaaaaaaaaaatcttgcaagcactggcaagaatgtggaacaattcttcttcttcttctttttagacagtctcactctgtcacccaggctggagtgcagtagtgtgatctcggcttactgcaacctccacttcccgggttcaagtgattctcctgtctcagcctcccgagtagctgggattacaggcatctgccaccacacctggttaatttttttgtatttttagtagagatggggttttgccatgtgggccaggctggtctcgagctcccgacctcaggtgatccacctgcctcggcctcccaaagtactaggattacaggcgtgagcgaccgcacccggcctaatttttgtatttttagtagagatggggttttactatgttggttaggctggtctcaaattcctgacctcgtgatccacccaccttggcctctcaaagtgctgggattacaggcatgagccactgtgcctggcctatgtatggtaactttaactttttttttttttttttttttgagatggagtcttgctcttgttgcccaggctggagggcagtggcgtgatcttggctcactgaaacctccgcctcctgggctcaagcagttctcctgcctcagcctcccaagtagctgggattacaggcacgcaccaccacgcccagctaatttttgtatttgtagtagaggcagtgtttctccatgttggtcaggctggtcttgaacccctgacctcaggtgatctacccgcctcggcctcccaaagtgctgggattacaggtgtgagccatggcacctggccatgtatagtaacttttaaagaaaattccaaactgttttctaatgtagctgtgctattttgcatttccaccaacactatttgagagttccagttgctccacatcctcaccaactcttgatattgtcaatcttcaattttagctatttattgcccatatactgactgaatgtagagaatttgcatttctctaatggctaatgatgttgaggaccctttcaagtagttatttgccattcatatatcctctttggtgaaatgcgttttcaaatattttgcccattttaaaaatcagatcatcttcttagtcttgagttacaagaatttttggccagtcatggtggctcacacctgtaatcccagcacattgggaggccgagtcaggcagatacttgaggttaggagtttgagaccagcctgaccaacatggtgaaaccccgtctcaactaaaaatacaaaaattagccgggcatggtggtgtgtgcctgtaatcccagctacttgagaggctgagacatgagaatcacttgaacccaggaggcagaggttgtagtgagctaagatggcaccactgcactccagcctgggcaaacggagcaagactctgtctcaaaaaaaaaaaaaaaaaaaaaaaaaaagatttctttatataaatattttcaccaagactggtttgccttttaatttttttctttcttttttcttttcctttctttctttttttttgagctagggcctcaccctgtcacccatgctggagtgccatggcatgatcatggctgactgtacccttgacctcccaggctcaagtaattctcccaccccagcctcctaagtagctgggactatagatgcacaccaccatgcccggctaatttttgcattttttttgtagagatagggtttggcactattgctcaggctggtctcgaactcttgaactcaagcaatccacctgccttggcctctcacagtgctgggattataggcatgagccgctgcatctggccaccttttaattttttaaatgatgtcttttgaagaacaaaagctctcacattgcagaataggatccattttgggttaattttatatatgatgtggggtgagggtcaaggttcatttttttctccataaggttaatcgattgttccagcaccttttgttagaaagactgtacttctccttactgaattgccttaacacatttatcaaaagtcagttgcttttatgtgcatggattaaattctgaactctcaattctgttccttgatcacttgggctcaagtgatccttctccctcagcctcctgcgtagctgggaccacaggtgtgtgccaccatgcctggctaattaaaaaaaaaaaaaattgtagcaatggggtctcactatgttgctcaggctggtctccaactacaggcctcaaacgatcctctcaccttggtcgcctaaagtgttgggattacaggcatcagtcaccatgcccagccctatattaagtcttaaaatcaggtagtctaagtcttgtaactttgttcttttttttttttttttttttttttggcttttctagatcctttgccctttcatataaagggcaaagggcacattgtcaatttctaccaaaaagaaaaaagactactgatatttttattgggattattttgcatctatagatcaatttggaaataatttacatcttaacaatattgaattttccaacccatgaaaacattctatctcttcattatttaggttctgtttagtttctataagcaatgttctacagtttgggggtacaactgcagtttcacatcttcaccaggttatccctaagtgtttcatggccattgttaagtggtgtttctaattttctattttaattgttcatgactagcttatacaactcaatggtatttctttatattgggcttgtatttgacaacactgcaaaactcgcttgttagttccactagcttttttgtgaattccattcagttttctttttttcgtttttctttttctttttcttttttgagatgaagtcttgctctgtcgcccaggctggagtgcagtggtgccatctcggctcactgtaacctctgcctcctgggttcaagtgattctcctgcctcagcctccctcgtagctggaattacaggtgtgcgccaccacgcccacctaattttttgtatttttagtagagaccgggtttcatcaagttggccagattggtcttgaactcctgacctcaggtgatccgcctgcctcagccttcccaagtgctgggattactggtatgagccaggatacctggtccagttttcttttttctttctttcttttttttttttttttttttttgagacaaaggtttttgctcttgttgcccaggctggaatgcaatggcacaatctcggctcactgcaacctccacctcctggattaaagtgattctcctgcctcagactcccaagtagctggggttacaggcataagccaccacgcccagctagtttttgtatttttagtaaagacagggtttcaccatgttggccaggctagtctcgaactcctgacctcaagtgatctgcctgtctcagcttcccaaagtgctgggattactagtatgagccacagagcctgtctcagttttctatatagatgataatgtctgtgaataacgacagctttaatttatttctaatctgtatgcctttctttttcttgccttattgcactggctaagaccttcagtacaatgttgaatagaaatattgaaagtaaatatacttgctttcttcttgatcttagggagatagcactcagatttttaccagaatttgtgatgtcggctatagatttgtgtagacaccctttattagattgagaaagtgcagtggctcacacctgtaatcccagcactttgggaggctgaggtgggcagatcacgaggtcaggagttcaagaccagcctgaccgacatggtgaaatcccctctctactaaaaatagaaaaattagccaggcatggtgtcatgcacctgtaatcccagctactcaggaggctgaggcaggagaatcgctttaacccaggagatggaggttgcagtgagccgagatcacgtcactgcactccagcctgggtgacaatgcaagattctgttaaaaaaaaaaaaaaaaaaacaaccaatgggtcatatacaaaaatgatgacccagaatgacttcagactgctcaatagagacagtagaagtaggaggacgatagaggaatcccttcacattcctggaaaaacatcatttcaacttaggattctatacctaaccaaactaccaaagaagtatgaggagggacacaaaaacatttcagacacgcaaagtctcccaaattttattgcccatgcactctttctcaggaagatactgcaggatttttgccaccaaaaagatggagtaaaacaaataagaagtcatgggaggctgggcgtggtggctcatgcctgtaatcccagcactttgggaggctgaggtgggtggatcacctgaggtcaggagttcgagaccagcttggccaacatggcaaaaccctgtctctactaaaaatacaaaaattagccgggcatggtggtaggcacctgtaatttcagctacttgggaggctgaggcaacagaatttattcaatccaggagatgaaggttgcagtgagccaagatcatgccactgcactccagcctgggtgacagagtgagactctgtctcaaaaaaacaaaacaaagcaacaacaacaacaaaaagaagtcatgagagccagggggaaaggagagaactgaaggagatttccagaacaacgggtatagcctgggtgcagaggagagtcggttcaaaccacagcaacttaggaggcactgggagagctgccttcaggaagatgaaattgacggaatagctgatgggcccaaaagcattgagatggcttaggtaattggcaggatgtctgcgatcaaactagtaataagcacattttaaaaaatgaagcaggccaggtacagtggctcacacctgtaatcccagcactttgggaggctgaggcaggaggaagacttgctgtatacaggagttcaagaccagcctgggcaacatagtgagacctagtctctacaaaatatcaaaaattagctgggtgtggtggtatgtgcctgtagtcccagctactcagaaggctgaggtgggaggatggcttgagctcatggggttgagggtgcagtgagctgtgatcacattactgcgctccagccttggtgacagagtgagaccctgtctcaaaataaataaaataaaatgaagcaaaataaaagacaaatagaaagcccagaaaaaatacagttaattttgagaagtgaaagtagtcatagtataccatgtggctcagctatgaagcaaactgacataatcttaatgatataatactggatattgctataaccaaaaggacaatattattatgctgggagaatggagggaaaggaggagcagaggagagccataccctcccactctatagtagccatcaataggtaatgttaaacaccaaaagatccagaagtggcccatagcatgcagttttcgtggtttacacaaaagaaccagctaaaggaactgaaatggttgcctctggaaagaggtaaaacagggtggggaatattatttttctcaatgaaccttgcagagggccaggcgcggtggctcatgcctgtaatctcagcactttgggaagctgagggcggcagatcatgaggtcaggagtttgagaccagcttgaccaacatggtgaaaccccatctctactaaaaattagccgggtggggtggcatgcacctgtaatcccagctactcaggaggctgaggcaggcgaatcacttgaacccaggaggtggaggttgcagtgagctgagatcacaccactgcactacagcctgggtgacagagcgtgatcctgtctcaaaaaaaaaaaaagaatcttgcagaactatatgatatgtgtgtatatgtacacattataaatataaattatatgcatgtataatgacgtgtgtatccatataataagaaaatacatatatatacattacacaggtataattttgatgtgtaaataccaaaaaaagaggccctgaatataatctctaagggaaggcagtcggggggcctctgcaactgcctgtggaccttcgctggagggaaacaggactgaggtgggtgggctactcaggaagcctctgcatggcccagcaaagacaagagcatggcctagactatggccctgcaggagaatggagagaggtaatcagattagagagagagaaaagatgtggtgaattaactggggtatggggcaggtagaaggtcagtttggatgccccagtctgggaaagcatagtgccctccactgagctgaggcttctcctttcagaggggaaacagacgtcatcagaggagaagcccctcaccttcctgcctcaaacccccgccccaggaggaccaccttcatgggcaggtggtcagtcagtcacacaggacttccctcctcaaagggccaggcatgtggcttaatgctctgctgtcttgaaattcataacaattgttgaacaaagggctccatgttttcattctgcatgggaccccacaaattatgcagccaccccttcccacccccagtatgtctgtacccatgtctggctcgcgttacctgctcaggcatcaaaattatctgtagagcttgtaaaaacccaaactctcagacccacctccacctctatgtgggttcctgatgtcaaggacaactgccaccatcctctaagtgtcttagaccttctgtcctcaaagtgtggtctgagacctgcagcatcaacctcactcgagagcttgtcagaaatgcagattcccaggatccaccccacacccactgagtcagaacctgcagtgtagcaggacccccaggggactcacctgcacatttatttgtgagaagcaccgtcttaggctatctcaagggaacattctagacttttccccctaattcacaggtcaccaggtactgcgagttattccctaattacatcacacatcccgctgcaactgcccccaggatggctcctcttggaggtcccacgacctctcaaactgaacatacccagacctgagcgccctgccctcttcttctcccaagtcacttcttcctccccctcctcctcccctttttccagtacctgtccaggtgaactgagccagccaagccaggtacccaaggagtgttccagggcctcctctggctcacctccctccacctctcaccatccccttctcccagtctctatagcaaccaccaaccaccctccaagacgtagccaccagcacctctcacttcagccacctccaccatctcgcactggcagtggactgaccatgtcactccctagaacgacccctcggtggctctcagctcagggctgttctgcaatggcacacctccacacctgctctctgcttactaaatgcttccactattactattgcttccagctttcaaaacgaagcctgatcagcttctcctccacagcctgccctggctacccctctgcctgcccccaccaaaacttctgggctccccttagccacagccctggtcctgctgtggtctgtgagtttcccccagcagcctgagagctcctctgggagggacagggaactgcctgattcaatcaccagcctggtgctctgcctggggccatgcacacaataggggtcctgtgtttgagtagataaaggcccagtgaggggctagccttcagcaagccacagggagatggcagaagatggggttacgcagcgggagtggggaaagctgttacagaggtgcccttgtggacccagctataggcgggaggattgcttgagcctagttcaagaccagccagggcaacatagcaagactccatccctaaaaaaaataaatttaacattttattttatttatttttagacggagtttcaccttgttgcccaggctggagtgtagtggtgtgatctcagctcactgcaacctctgccccccagattcaatcgattctcctgcctcagcctccctagtagagctgggattacacgtgcgcatcaacatgcctggctaatttttgtatttttagtagagacggggtttcatcatgttggtcaggctggtctcaaactcctgacatcaggtgatccacctgcctcggcctcccaaagtgctgggattacaggcgtgagccaccacgcctgaccaaaaaattaaatttaaactcttaaaaaggtcagccccggttgaataaaaaacagagagggatggctacaggacgcctggtgcccagttcccgtccagagccctggaggacagcaggattctctctgcccaccaggtggcgccagattcccggcgtccggctgcccagcgctcggtgttgggtggatggggccccagggaagccagaggcagagcctgcaggacccacagcaggtcctcgaggggacatgccccatctgctttccttgcctgagcgtccaccatcagcaccctccacagtacagggaggagggctgtggatgatgggtgtgtcacgggaaaatggaagagaaggctgagcgtcttgcaaagcagctatcgggtgatggagctagacatttgcacacctgcaggctgggtcacatcctgttttctgaagacgctcaccatggggcctgtctgcgcggccaccggagccaggatcgagcccagacagtccagtcccaaacagacccacactcttaagcactgggcttgcctgctgcccctccctgcggtcagatcccctcctgttacagatgaggaaactgaggcccagagaggggaatcgcttgctgaggatccaccccttgtgtggagcagaaccaaaatgagggcttctgcctggtggctccgaggccagcacgccttcctccgccatcgtggaaaccccttgtcccttcctgtccaaggagccccggcccccctcccgtgggcttttcccaggagcctccctgttctgcccagctcccctctcctcccttgctccagacccaagccacccacagactacaacccttcctacagcccctttcaacagcccccgagaggatttccaccagggattggaagaggtcctcattcctcccacccccgggccggatgggggccggaggggcaggtgcgcgagcggcgccggatggaggatagaggggcaggaggaggtgtgggcaggcatgtcttttccgggtcccacctgaggccccaggtgcagccccctcgcaccatcccccgtctgcctgtgtttgggacccagggctgcggccgagatccatttcctcccagcctctgaccacctgctcctgcctctcagcacgtctgcttctcccctcatccccttagcaagccctggcctctgctcctttcctgcaagcgccccacagttatcctgcctcttctcagggcacccttcccttcctcccatgtctcagtgttgtcttcccccagctgggccctgggcagccccctccctgagcactcctccaccagccctcagtccacagctgggaaaactgaggcctctaatctgggggctactcaggcacatggttggagttcagttatctgtgtgtcccccaggcctggcacagagccccgcactggggtggactctgcagtgggagatggtggatgggttcagcacagagcccagcgctggggtggactctgcagtgggagatggtgggtgggttcagcacagagcccagcgctggggtggactctgcagtgggagatggtgggtgggttcagctgtgctggaatcttgctccaccacagcatgctgtgcagcctggagcaggtccctcaacctctctgaacctccattttctcatttgtaaaaccaggaagaatgaggcctattttttaggcttgtagtgagaattgacaagacaacgtatgcaaaataaatatcacagtataaggtggttgccattcattcattctataaatattgattgaacacctttttttttttttttttcagatggagtttcactcttgttgcccaggctggagtgcagcggtgtgacctcagctcactgcaaactccgcctcctgagtccaagcaattctcttgcctcagcctcccaagtagctgggattacaggcgtgtgctaccacgcctggctaattttgtacttttttttttttttttttaactagagatggggtttcaccaccttggtcaggctggtctcaaactcctgacctcaggtgatctgcctgcttcggcctcccaaagtgctgcgattacaagcgtgagccactgtgcccggcctgattgaacacctattatgtctcattattattaagttcaaaagaaaagaagccaattcagcagaccccagattctgacctcccatcctatgctgtttcctggtgcatcctccactcctaatccacacggaggcgtcaccctaaattacccggctgcacatatcactaccctggtcaaaagcccccagcagttccccggtgcctagggtgtcagctcccgactcctggcagtgacactgaagaccctctgtgatctggttccagcctcttttccatgggatctctctatcttgtgacaccaactttgactacaggtgtgcagatctgggtcccgtggccagaacaccctgggctttctcactgccacgcctgtgctcctgctatgcccttgagtggaacagctaccatttttgtccttacccaacaaagtcccgtccgcattttctggcccatttcccccaggtggcctctctgaccacctggagccaggctctgaacctcagtcagcctcctcgcctaagcatcccgttccccactccccaaccgggccctgcaaggccagctctatcaccaatcattggcaggaaccactgggctaacagcaggtgctggaccgatccacatgacaggggatggcctgacctgcccgtgtgatcagagtccagctctgccactgtcccacggggatcattcttatccgtcacattcctaaatggactagaatggtggcctcctctgccctgggaccctactctctccaggcaatggagaaagagccaggggtccccccaccactaactgccccactgacactgtggggtctcttcccatagtcacggtgcaggcatcaaccagataccagactaaatgggattatccagacaggaccactgggccagagccttctgctggagggagggagctttgctcctcccctacaccctccctgttccagggctcagtcccttccacaaggtcccaccaagccttcacaagcctgccccgtctagcgatggggagccccataccccctggggcatcttgtccatctctgatagttagttcagagctgagctagctgcctccacggaatttctgccccattcattcatcctctgtgagttccttctgcacgcattgagcacctactgggtgctagttgatgtgccagctcgcctgagctttgcaacacctctgtgaggtgtgaaggcggatgctgatgacagtgatggttacaaaaccaatgaggaaagtgaggtgcaaaaccaatgaggaaagtgaggtgcaagagagatcgccacccacacagaatctcacaatcatcaggcagcggctgggccaggagtagattttccatctgggtgacccaggagcctgtgctctttcttccactgaactgaatacgtcccctagcaggacttaggaggggtaatacttggggaggtgggggcaggactagcctatccagtcccccaaagccttcagtagagggcatagagctggacctgcgttggggttaccaagggtagccaagggtagttttggagctgctgcagccgctgctcacccccgggagcctccttctgagaaggaagtattattgagcctacattgtgttgggagggaaaacgtggggtccttggagccctgccagccccctgccttcaggctgtttggctttgtttgtttttttggtcttttttttttttcctttttctttgggctgattgttctcattaaatctttttgtcctgttttgttttttacggggctgacaatgctgctcagtgcttagcgcggcttcctgtgtttctgccccagcgcaggcctcgatggggctgtgcttcctgttgtgagccgtcgccatggcaactggaggcctggtgggctccatgggggtatggggaggggtgacatcagtgacgtcaccgggtgagaaggcaaggggcaggggtctggagggggttgcatgggggaagggcagccagcagccagccggcgcattgctgggagctgactcacagcccgggaaggggaagaatgccctcacattcttttgggaggtaaacaaggtcagggaatgcggctgggatcctgtttacctgaccctggccccccgggggacccgaagcccttacaggacaacacactggaatagaaccagccagacttggggggctagggaagcaggggagaagagaggaaccgtgaggggcccccaggtgggggccagagacagaaagcccaggattccaatcacatctccactaggtgacagcgtgacagctctatgactctgagcaagccacatggcctccctgtgcctcagtttcccctatttctaaatggggagaatttctcgtgcagatggtcccttggtctccaatcactttgggctggtttcgggggttgcgagggtggcagcacagcccgtgcctctgcattttctccgttctccacccgcccaaggcctgatccaaggctagggtctccacgtctctgcctgcacctgaccctgctagggtaatgccccagacctgtagccaaaccaaagggccgaggtgggctggcctcgaagggaggtgatgggcgtgcagcccagggcggggcgcggcacctctaggatcccagggctggagttggtgcagctagccccgctctctcccctaccctgtgtccccccttcagctttctcagagccccacctcttatccctgaacctccagagtgacggcctcccctgctcattagggagggtccagaggagcccctcctggtgccaatggtctgtatcctgatcaaactctgggattccatggtgctgagatctgcaagaacagccccgggggcagggccggactctgcatctctaagacaaacctttgccacctttgaaactgaccagctgggaacaacgtgcccttcccccacaggtgccatgtgagggcacaggccatgcccccatggccacagttgagttggggccacctggcctatggctgagagtctgggtatcagagtctgactggctttgcggcttgctagctagggccttcggtcaagctccttagcctctgtgagcctcagtttcctgatctgcaaagcagaagctcccagggttgatgtgagactgagtgagttaattcacatgaagcccttagcgcatagtaggccctcatatgtgctgaacccacacagagccagcccccacagacccctgcatcctccgcagcagcacccaatgcccccgtctctgagggctcccctatgctgaacacccgtcccagtgcaggaacagtgcccaccagatgccccatggttttcccataaagggaccggacttgggtttccctggacagggaatatcctgttctgggctggcgggggggaggaagaggagcgggaaggacacggcggctccgcattcctggcattcttggcggccgccctgtccagctgcctcggcgctgccgggggccctggcctactgccatgctggcccgacacggcacagcagcaccccgcttggggcgccccttggacttggggtgatagaggacccatcttgtgccagtcccacccatcccagactatcgcagaagcaaatgaaccccaaccctggaagcagagattcgggggctctgggaggagtcagttaacaggggaggagtttctgctttcagttctaccttatggggctccctagcccacctaccgttccccagggaagctctcggggtcagagccggaagaggggagaggtagaagactcctgggttctagtctccagtgcccagacagccacttcccctctctgggactcagtatctctgtctgcaagatgggagactttgatcccttccttgggcaaccccagcattgctgcccttgtcacgctctatggcatcatcactgcctctctgcagagcctgtgcctctggctaagggcaggagcccatcccttctccgcactgggccgggcctggtgggatatagtggttcccaccgccacgcagccatggtatgcaggattcgaacattcagaggggagggcctgggggcggtcaggctctggagccctcaccctgggagtgcctttggggtcctaggaggaaaggggtccttgtccaagatcccacagctagctcggtcaagctgacccgggaatccggggacttgctgttctgcaaaaccaccagaaactagggtaattcttttccatgtttttctgcaaacgccccctagtttcaggcccagagcagtctggggagaagctgggagctggaggcttcagagacctccactctgcaggagaccaagcccgctccccatgctgccctctgcccttggggagcctggaggggtcttccagggccgggaggggacaggcaggaggggctgcagtgggatggatgcatctgggctgccagtctctagcctcccaccctctccctcccctctcctgctggctcgaggaccaccccaagcccctgcccagtcctgggaactccagctccatctgcactgcaggccccatttcccacttcaacagctcacggtggctctgggcacagggaccagagcaacctggtccaggccacagcgagaggcaggagcagctctttgctggagtcaggaggcctgagaagtccctgggcctctgcacctccacttgatcatcacagggttagaggatgtggtccctggggccagcctcatcagtcctctgtggtcccaggattctgaaattcaactgtttggttctgagaccatcagtcacctccttctgcctgcccttgagaggattaagcagaggaagtccctccctgttacctgctcttctctagggctcaccctgcagagttcagctcccatccaggccagggccctgctcccaaggaccccatctccctaccacttgacccccccaaaaggccagacacccccaacgctattgcctccgccttcccctggtgcctcctgcctgcctgtcccgcctgcctgtcccacccgcctgtcccacccgcctgtcctgtctgcctgtctggctggctggccatctgtctgtctctctgtctgtctgagggacagtaggaggaaaaggctggaaccccaccctgctgggtccacatgtccagggcattgttcagcctcctctgggaaatcacctcaattgtgaggcttaggggccactgcggcacggccgggtgtgtttacagatgcgggggtggccaggggttgtgtctgtggaggaggatgggcacagggggtgtcacgatcatctgtgtgtggcacgcttgattaaataatgataaaatgacgaaatggaatattatgcagccatcaaatacgaggcctttgaagaagagtgaggacataagaaatggtcccagtgtaagatttactaaaagggaaagtgcacaatgagaagaagtcaaagtgacccaccaaatgctaatcacagtgatctctgcgcagccaaatcatgagtaatttcctatttcctgtgtatttacggtgtattttcaatgtttttggcaatgagcacgttcgttttgtaatcagaaaaaggagaataaatgttgtaaaaatcaaactaaagatgaactagaaaacaaatgaacatgactaaaataaaataaactcactgggcatggtggctcacacctgtaatcccagttcctcaggaggctgaggcaagaggatcacttgagcctgacagtttgagaccagcctgggcaacatagtgagaccctgtctcaaaaataaataaataaataaataaaataaggccaacagaaaagactaaacataaaactaaggcaaatgttcaactccagttagcaaacactgagtgggcgcctgctgtgtgcagaggctctgctgagtgccggggttacagaaatgaaggagacggagcccttggcgagttaaccgtccatcaggagggtgggagagtcaccagtcatgaggccccctcaggagggcaccggagagagggagacatggatgaatcaggaggccttcagggaggaggtgacggctcacacagaggctggggacaggggatgtggtcctggtgggaaatatggccggtggtggttggagggtccgctggttgcacgagctcagtttaagtatagcgtggggaagataggctagcttcaactcgctacaagtctggagtgccgggtggagagagattcttagccaagtgggcattcctcaggaaagaacacagggaatggtcagccattcattcactcattcatttattcaattcaacaactacttcttgaataccatccacacgctaggcactgtgcagcttccattcaaatgcagggaaatgggcaggaaagcaaccaatgagtaaagggaatagaagttggtgctgtgcggaaggatggggcagggtccagaggtgggggtagcttgatgtggggtgaccagggagggcctcacagactgaaggaagtgagggagtgagcccactgaggctgggctctgcaggaggagggctgtcagcagagggggcccaagcagacagagtcagggtgaaatcccataggtccttgcaggcctttgtaagcacctgagctgcggctctgagtgaggaccggagcaggagccggggagggtctgagcagagaaacacatgatctgacttaggcttaagcagcctgtaggaggggagctggtggggctaggctgggccagcagccctggtgagggcgaggaacagaaggcggagccaacagcagtacggcctatctgatgaagggtggtggtaaaggaaagagaaggtcaaggcctattccaaggtttgggccctagcacttggaaggacagagctactgaaactgatggggccagctggggatggcaggtttggggtgggatggagcagggaagacaggcactgaggctggacaggtcgaggtggtgatgcccggtgataaatccgagacttccacccggcaaagctgagcaggcaggggccagctggggacactcatcgggcgtcactggctcgtgggtggggatcagcccctagagccggatgagaccaccctggggaagggtgtagacaaagagtagctccaaggattgagccctggcaccccccgccaacgtttagagatgaggggggccggcaggggagcctgagaaacagcatcggggaggagggaggcccaggagggtggggcctcagccgaggtgcctgcaggcagcagatggaacagccacaaatgaggctcccacagagccataggtgacagcctgacggggaggagacttgcgaaaagaacaggagagaggacattaaaaggcaaggagggccgggcgcggtggctcacgcctataattccagcactttgggtggccgaggcaggtggatcgcctgaggtctgaagttcaagaccagcctggccaacatggtaaaaccccatctctactaaaaatacaaaaaagttatccgagcatggtggcacatgcctataatcccagctactggggaggctgaggcaggagaatcgcttgaacccaggagacggaggttgccgtgagctgagatcgcgccattgcactccagcctgggagacaagagtgaaaatccatctcgaagaaaaaaaaaaatggcaaggagaaagaactctcccctcagagattcgagggccccacccttgtccctgatggctgcccctctcaagggtgaccaagaggtggctgtttgctgcgggggtaagggtgatgggcagagcttggtctgggtgctcacgcaccagcgctccaggccattcaaggtgtggatgagagctgggggccagaaaagaaggggggtgctgtggagcgaggccaaggccaaggctggctctccccaaaaagccaggtcccaggagccggagaattctaaatccagccctcattgagaagatctacttagcgagtaggaagaaagcatacttgatttaacagtttgttcacgtatttataacatcttgatatttagcctcagagcgtgcaggcctccatctgtgctctgggcccgagccctgcacatgttagggctgagctgggagcagacagcttgaggggagaggtgaagggagagggttttctttttgcttcggttcagtttttagtggttgctggtttttgttgttgtttgtttgttttgaaacggagtctcactctgtcgcccaggctggagtgcagtggcgtaatctcggctcactgcaaccttcacttgccagattcaagcaattctcctgcctcagcctcctgagtaactgggattacaagggccagccatgatgcctggctaattttttgtatttttgtagagacgaggttttgccgtgttggccaggctggtctctaactcctgaaacttcaggagatccacccacttcccaaagtgctgggattacaggctggagccactgtgcccagccagtggttgctgttctttttaagaagaaagaagaatgagcattctcccctggggaatgatcctgaagagcggacactgcgggaggaggagaggggtgtgcatggcgggagggataggtccacccgccttgacacacaggccctccatcacagtggcagcaggaggcagcgtcagtgggtgcaggggtgcacagtgagcacagggaggttccccaggaccccttctgctttctcagtgaaaaggcagcaaggccctggaggtctgaggggtaaggagaaggtgtggaagagccctcttggagcggtgcgtgtagacccaggaaatgcagcggcattgcccagcaacactctggcagattgcattttccaagatggctgcaacaacatctcccgccccacaagttattctagaacctttcgctcctccaccaagaggtagagtctaatttcgcctcccctagaacctaagcaggcttgcgactcactgtgctaccaatggactgcagcggaagtgacaatgcatcacttttgaggctaggttatcaaagcttctgccatatggagtgctcaggctggcgccttgagcctccatgctgtgaggaagcccaaccagcccctgcacatggaaaggctctcagagcacctgaagagagagttgctccagccaccacctgtctgtcacctgtgagaccctgaacaacccagctgagcctctcccaagttcatgacccacagaattcaggaaagataataaaaaatattgttgtcttaagcctttaatttattatgcagaaatagctaattggaataaatgccaaggactaaactgagatttgtggttgtgaatttaaagtgacactcctttttagccaaatgatatctaaggcatttctgcagggacaagaggctgcacagtcgctgcaggtttcccctccttgctgcaagggaggagagagacaatggaggaggaaaggtagaggagattgggcctaaggtgtcaggcaaagttgtgtgaactggactctgtaggtaaccgggagctactgagggtccttcagtgagagatgttacattccatgcataggctgagctcattctggacttagcaatacagaatgcagcctgcatccttggatgaactgggggtatgaggaggagagaggtctccccagaaagcctggccacaggtcagaggctggggactctgggcgtagctggaccttcagccccttctctatctgcctgttccttagacattcagccaactaggagaggggtggagagtggtgaccctcagtgttcccacctgaaaaatgggcacattggacttcaggtctctaagtgggcttctggctctgaggctacagacaggaaagagacatttgtggtcatatttccacatacacattgcttgtggtcaggacagatgctaggctgagccctggctccgtcctggttgctggagatgcaggaagaggcctggccctcactatacaataggccctgctcaggattcttaggttcaaaggaagagaaaacccaactcatggtggctttaacaactggaatgtggctgggcgtggtagctcacgcttgtaatcccagcactttgggaggctgaggtgggtggatcgcctgaggtcgggagtttgagaccaacctgaccaacatggtgaaaccccatctctaccaaaaatacaaaattagctgggcatggtggctcatgcctgtaatcccagctacttgggaggctgaggcaggagaatcacttgaacccgggaggcagaggttgccatgagccgagatcgcgccattgcactccagcctgggcaagaagagcgaaaccccttctcaaaaaaacaaaacaaaacaaaaacacaaacaactggaatgtgtgagctactgaggacccgagctactgagcaaccaaaaagcatgggggtatttgagggttcgagcaaaacttgatccagccatgaaactgagtgacaggacccatttctctgcctccctctcttagctcctctcttgggctggctctcccatgggggtctcaggcggctcccaatcggtctagatctttttttggcgggggaatggggatggagtctcgctctgttgccaggctggagtgcagtggcgagatctcggctcactgcaacctccacctcctaggttcaagcgattctcctgcctcagcctcccaagtagttgggactatgggcgcgtgccaccatgcccagctaatttttgtagttttagtagagacggggtttcaccatgttggccaggatggtctcgatctcttggccttgtgatccgcccacctcggcctcccaaagtgctgggattacaggcgtgagccaccgcacccagactcttttttgttattattattattatttttttagagacagggtctctctgtcacccgggctggagtacagtggcatgatctcagcccactgcaacctctgcctcccagggtcaagcgattctcctgcctcagcctccagagtagctgggactataggctcaggctacagcgcctggctaatttttctgtagagatgggatttcgccatgttgcccaggatccaatccgggtgtagatattgtccttctctccatgttcagtggagagagagagacagtcttcttcccggggagctcagatatctttgctctgattggcctgacttcagccttgtagccatccctgaaccaatcacaatggccaccagatgggatatagtaattgtcttaggccaatgagagcccacctggggcggggcagaatctaccccaccctgggctgggagacactgggtcctgttgggagagaggaagggatggacgaagacccaaagcatgtccctggctccacccagtagaaccttctggagactctatgctctgtcagagacgaagtggttgagcaccagaaagggggcagtctccccatcagagctatttcctgccaccagtaccagctgcccatctggcccggcctggagccccgggatgcaggcagccgctgttggcgggaacccagggcctgcttgggacgcttgggcagctggagactgattaagctgggaaaagtgcaggctggagaagactgggacggggaagtgatccgacgcttccttaacaccaaaaaagggaacagaaagggtcaacctaggcgccaggaggaatccaaacaggtagcacataacaaaagcagatgactcttccgtttgagtctgactgtgttccacgtccgcacgcttcctcccccactacccaccggagcacggctccgtagggatgactcccttgctatgacagggaggctgaggccctgagacaagtgactcacccaaggtcaccgtgaggtggggcaaagccagggtatcagcctgagctctcccaggacccccactccacggcagcagaactgagccatacctgtgcccactcctgcagcaaggtgatggtgacggtgaagctcctgtcaccaccactggggaggccattccagtccctcacggcccccactattggagaggcaggggagcggacaggaaaggggctgccgggtccaactggctcaagttcaagtcctgcctcccccactctggctgggtgaacttgggcaagtcagcatcctcatttgcgaaatgaagaaaccgatgcttcctttagcaggaatgctaaggaacgaatgcaggaagcgactgacatcacacgtggaaaacagctagcacaccgggcacagggaaaatacgacatttctcataagaaggaaggaaggtgtttgaggcttagttaccacaccacggcaggaacactacagtacacatgtgaacccagtgctgtggggagtagaggtttggtggaccctttcaaataaatgctgaaaaccagagtaggggtggagggtgtttcccaagaaataaaccaggggtgcaggaacttcagtgctgttcctgccactcagcagggacccaggcactccagaacctgctctcacactttccccaggcactggaacagaactctcaccccctgagcctgggctcagcaggggcaaggaggctgtagacaggaggtcattgtccagcccgactgtgtccagatcccacagatgccaacccatctgggggacagggtcttctggggacccgcctgccatgggggaggctatttgtcccctagttgccacgggagacttagattcaacactaggcactctctccagtgtcctgacggtgacccgagagcatctccaccagcaggcctgggtggggcctgcatagacaaagcggcctttggctgccagcggccgggttgcagagcgtgcgtcagctcagcagccagccagagaggcctggaagtcagccttgctgcccccctcccttgtcaccatgtacatcttgtttcttgtcatgacacgatgtggcagatgtttcttgtcagctctgccgctggtcccttctgtccacccccatagctgctgccctggtcgccccaccaccccttcctggtctcacagtcagtctgtgctgcacaccgcagccagagggagctttcagatatgcagttcaacctcatcagttcctagtttagaatccttctgtgaatatttgcaaaacgagtacctgacaaagcattcatatcccaaatatgtaaagaacttctacaaatcaataagaaaaacagaggcaaccagtagaaagggggcaggagactttgagcaggcccttcacaaaagaggttctccaggctgggcgcggtggctcacacctataatcccagcactttgggaggctgaggcgggcagatcacttgagttcaggagtttgagaccagcctggccaacatagcaaaaccccatctctactaaaaatacaaaaattagccgggcatggtggtgcacgcctgtaatcctagcaactcaggaggctaaggcagggagaattgcttgaacccaggaagcagagattgctgtgagccaagatcacgctgctgcactccagcctgggtgacagagtgagacttcatctaaaaaaaaaaaggtttataaatatgtaaaagtgttattattcatcagaagaaggtaaaataaagccacaatgagataccactgcactcctaccaaaattgctcaaacgaaaatcataaaaaatgtcaagtgttggtgggaatatggagcaactggaactcccagaacattgctactgaagggagtgcaaattggtgcaaccactttggaaaattatctactaaagccgaacatatgcccagcctgtattcagcaattccactcctaggtaggtgtccaacagaaatgcgtgcatatgtccacccaaagacatgacaggaacactgacagcagcttcattcataccagccaacaactaggaacaaccaaatctccatcagtagtagaatggattgggaatgagtgagatttgtgaggtgcaggtgcacacagtgacatgggtgcgtctcacattgtgtcgagaggaagaaactacacatgaggtgccgtggtttggacatgttgaaatgtaatccttggctgggctcagtggctcacacctgtaatcccagcactttgggaggctgaggcgggtggatcacttgaggccaggagtttgaggccagcctgaccaacatggcgaaactttgtgtctactaaaaatacaaaaattagccaggcatggtggcaaatgcctgtaatcccagctactcaggagaccaaggcaggggaatcgcttgagcccaggaggcagagattgcagtgagccgtgattgtgccattgctctccagcctgggcgacagagggaaacactgtctcaaaaaaaattaaacaaacaaaaaaaaagaaatgtaatccccagtgttggaggtggggcctggtgggaggtgattggatcatggggtggatccttcatgaaggtgcttagcaccattctcttggtactaagtgggtcgttgctctgagttcgtgtgagatctggttgtttaaaagcgtgtggcacctccccgctctctcttgctccctgtctggccatgtgacacactggccctggctttgccttccactgtgagtgaaagctccccaaggcctgaccagaagctgagcagggccaggtaactgtggctcatccaggaaatcccagcacttttggaggccgaggagggaggatctcttgagggtgggagttcaaaaccagcctggccaatagagtgagactccatctctacaaaaaatttaagaattagccagtcacgttggcatggcacacacccgtgatcccaactacttgggaggctgaggggggagaatatctggaacccaggagttcaagatgacagtaagcgatgatcatgccactgcactccagcctgggcaacagagtgagaccttgtcttaaaaagtaaaaataacaaaagaagccgagcagatgccggcaccatgctggtatatagcctgcagaactctgagccaatgaaacctctttataaattatctaacctcaggtatttcttttctttttcctttatttctttctttctctttctttctttctttctttctttctttctttctttctttctttctttctcttgctttctttgtttctttcttttttttttttttcagagtctcactctgtcacctggtctggagtgcaatagaacgaacacagctctctgcagccttgacctcctgggctcaaggggtcctcctgcctcagcctcctgagtagctgagactataggcacacaccaccacacctggctaattttagtattttttgtagagacaggtctcactttgttgcccaggctggtctccagctcctgggttcaagcaatcctcctgccttggcctcccaaagtgctgggattacaggcgtgagtcatggcgcccggcctgggtatttctttacagtcacgcaacagactaacaaagaaaattgcacacattgtgtgattccatttatatgaacttcaaaaacagacaaagtcaggatagtgcttattcttgtggggaaaggaggaattacacctgaggaggcacgggaggatttcttacagactggtaccatcctacctcttgacctgggcagtggttacccagctgagtttaactggtgaaaattcatcaagctggagacacgatatgactacttttctttgcatatgttatcttttttttttttttttgagatggagtctcgctctgtcacccaggctagagtgccgtggtaccaccttggctcactgcaacctctgcctcccaggttcaagcaattcccctgcctcagcctccccagtagctgggattacaggcatacaccaccacacccggctaattttgtatttttattagagacggggtttcaccatgttggtcaggctggtcttgaactcctcacctcaggtgatcagtccgcctcagcctcccaaagtgctaggattacaggtgtgagccaccgtgctcggccgcatatgttactctttaaaaaaagttaaaaaaaaaaaaaaaccagcctacttggccaagtgtaagttctcaccggcttatcttcaacgtcgtcatatccatacaccttccagcattactcccagttccctggacatgccgtgcaatttcttctgcctggaacctccttatctagttggcaatatgctctggggtcgctgccaccacgaagccctcccttctggccccagatagaagtgtggtcactctcttcttgggaagccatatgcacctccattgcagcccttattcatctgacagtcactccaccagtattcagtgagcactggttatatgccagacacatgcagttgtgaataaacagtcatatgttgacaaattaaatttaaacaatttaaaatatcacaaaaatagatagatactaacaaattgtgataaagcctccaaaagcaaagtccaggcaatccgttggaggagaaggcagggtacggggaggtggaaggtgctggtttatgctggaagatcagggcgggcccccagtgcagagacccagggatcaaagaggagcaaggccaagagtgggaggaactcccgaggctgagggatccacgctgaattgagaacactaaactgaatttcctggggtcacagactgggtcattcctttctcaagccccaggagcttagcgcagggcctggcccagttaggcatctggcagcattttatgaatgaatgaatgaatgaatgataggaaaagaagggcagagcgaccacagacagagtggtttgagggcccctggacactggttgccttcacaggtgtgtgcctccaactagctgagccaatgtgggagacagagattgggattcccagcagcacacacctccagcaagtgcccagagccccaggccaatgattcttttcttccttcattcattttgttgacaaatattaattaagcatctactatgtactgggctttaaactagaagctgtctcctttgccttccactcatgccagatctccagcaggctattgctctcctgagctctctgaggtttgagtctctctccacttctggatgtttccctaatcccgtacctcagtcacctgccatgggacctgccaggacatcctcctgatcaccaggagaaatccagggccatctttgattatactgccttgttattcacaagcccaaacatgatttagggggcagttgctcactttgccaaaagaatttctgctttaccaaaaaaattcccaaagttattttaattcgtcttcctaggaagatttcccagacgttgctggctggagggtaaagtggtgctgccctctcagaaagctatttgccagagcttggagcaattatgaaagcgggtgtccatgccacagcagccccactccacggtgtcaaccccaaagcacagggcacccaggtctacaggggagcatacctgagaggttcccgcagcagctgagggttggaggcaacccaggggtccccctctaggataagtaaaaagcggtggatacacatgtagtcagaggaggccctgacatctgcagggcagcatgggtcaaaccaaaaagacttttctgaggtcgggcgcagtggctcacgcctgtaatcccaacactttggaaggccagtaggggtggatcacctgaggtcagaagttcgagaccagcctggccaacatggcgaaaccctgtctccactaaaaatacaaaaattagccaggcgtggtggcacatgcctgtaatcccagctactgggaaggctgaggcagaagaatcgcttgaacttgggaggcggagcttgcagtgagctgagatcgcgccactgcactccagcctgggtaacagagtgagactccatctcaaaaaaacaaaacaaaacaaaacaaaaaaacttagctttgattagctttgagtaaaaagggagataaataaaatgggatgcctgacatgatagaatttgtgtaaatttaaaaggcacacacacacacaacgacaaaaagctatacaattattgaggatacacacggatttaagggcacatattgagtacattagagcggaagcctttgtgtgggggtgggagaggaatggaagtttggcccaggaatgaaaaagagattttttttttgaactcatacatacacctatatatatatatttttttggttttgttttattttactttgagacagggtcttggctggagtacaggggcacgatctcggatcaatgcaaacttccccctcccaggctcaagtgatcctcccacctcagcctcccaaagtgctgggattacaggaatgagctactgcacccagatcacatacatagtttatataaaataaaggagggctttgcatgaacaatgaaagtgtactacgaaccaaggaataaaattatctcaacaatccccacaagagataaaaatgtaaacttaaatttaaatttcaaaagttgactgctactgggatgtaatagacactgcctcccaccaaatatactgtaaaactctaggcatgatatataagacaagcaggaggagatctgaaaggagggaaggagaaggcagatctgctaggcccccgggaccccaggaacaccatggggtgagtttgctggaattttgttcgtttgtttgaatttgcctcctgtatcctcgacttggagctgaagacgccagcagccagaaacaccaaggggcatagatatttttttaaaactccacaaaggcctgccttcttcccaaagaactagaaaagaggcaacctggcaagacagaaaattttcagacaataattactctactgtagccaagcacctcagaaaaatctgtgtctgtgccgatgccagcaatggccgagtggagagcatagacatccgccctcaacaggttataacaaggttctccaacctccctgccagggcaccatcagagaaggccaagtacagagctgggactttcatccctacctaagcggtaacaaagcactccgccagctcatccgccaacaaaggccaagtggagaacttggatttatttcttttcttttattttcttttttttttttttttttttgagacagagtctcgctctgccacccatgctggagtgcatggcgctgtctcagctctctgcaacctccacctcccaggttcaagtgattcttctgcctcagcctcccgagtagctgggactacaggcgagcacccctacacccggctaatttttgtatttttagtcgagactgggtttcaccatgttggcctggctggtcttgaactcctgacctcgtgatccacccgcctcggcctcccagagagttaggattacaggtgtgagccaccgagcctggcccgagaacttggacttcgaaccccacctggcagtaatgaggcagcatccttgcttcccctgctaatgcagcatcagaggcaactagctaaagcaaaaggtttcataagatgcagagatctcataacagaatacccacaatgtccagttttcaatagaaaatcactcatggggccctgtgcggcggctcatgcctgcaatcccagcacttttgggaggccgagatgggtggattacttgagctcaggagtttgagaccagcctggacaacgtggtaagaacctatctctacaaaaaatacaaaaattagccaggtgtggtgatagacgtctgtggtctcagctactcaggaggctgaggcaggaggatcgctggagcctgggaatttgaggctgcagcgagctgtgatcatgccactgcattccagcctaagtgagaccctgtgttaaagacaaaaaacaacaacaaacaaaaacaaaaacaaaaaactctgaaaaatcactcatggcaagaaccaggaaggtctcaaaccaaatgaaaaggtaatcaatagatgccaacaccaaggtaatagaaattttttttgttggcggcagtggtggtggttttgtctttgtttagagatagggtcatactctgtcacccaggctttagcgcagtgatacgattttggctcactgcagcctcaacctcccagctcaagtgattctccagtgattttctcacctcaatcttctgagcagctgagactacacgcacatgccaccatgctcagctaatttttgtgttttttgttgagacggtgtcttgccatgttgcccaggctggcagaaacgttacaaacacacttgaaaccagtgaaaaaattgaaatcctcagcaaagaaacagaaaatataaagagatgcctcaaacacagaatggagagcacagaggaaggaattcgtgaactggaatgtggagcaggagaaatcatttaacctggataacagagataaaacagacctaaaaaaaaccaaatagagcttccaggagctgtttgactataatgaaaaaatctaacgtcatgtcactgcagtcacaaaaggagggcagggatgaaaaagtactcaaagaaataaggggctgggcgtggtggctcacacctgtaatcccagcactttgggaggctgaggtgggtggatcatgaggtcaagagattgagaccatcctggccaacatagtgaaaccccgtctctattaaaaatacaaaaattagcttggcatggtggcacacctgtaatcccagctacttgggaggctgaggcaggagaattgcttgaaccctggaggcagaggttgcagtgagccaagatcacaccactgaactccagcctggtaacagagcaagactctgtctcaaaaaaaaaaagaaagaaagaaagagaaagaaagaaagaaagaaagaaagaaagaaagaaagaaagaaagaaagaaaaaagaaataagggctgaaaatctgtctcaaatttggcaaaagacataagctgactgaatcaagagggctaagcaaggctgggcacagtggctcatgcctgtaatcccagcactttgggaggccaagatgggcagatttcttgagcctaggagttcaagaccagcctggtcaacatggtgaaaccccatctctactaaaaatacaaaaaaattattcaggcatagtgatgtgcacctacagtcccagctactcaggaggctgaggtaggtggatcacttgagcccaggagttctccacctcctggagggtgcagtgagccatgattgtgccaccacactccagcctaggtgaaatcctagagtgaaatcctgtcaaaaaaaaaaaaaaaaaaaaaaaacaggctaagcaaataccacacaggataaacccaaagaaatccacaccaagaaacatgatagtcaaattttcctggaaactaaaaacaaaacaaaacaaaacaaaaaaatctggaaggcagcaagagagaaacattttacctataggataaaaaaaataaagaaaaacggtggattgctcttctgaaactatggtgttcagagggaagtggtatagcatttttaaagtgctgggggaaaaaaatgtcaatgcagaatcctatgtccagagaaaatttatccttcaagaataaaaggcaaatcaaagtattcttggattaaaaaacaaatctaagagaatttatcatcagcaaacacactctaaaaaactaaaggaagttctcgaaacagaaatagaatgataaaagaagacatcaatctggaaacagaaaggaaggaagaaggaagaacatagcatgaaaaggtttgggtagccatgagacttctcccttcatgtttgatagtggaagcaaagatgataacaccttctgatatggctgtcaatgtatgtggaggaaacatttaagacaattataaatggaagagataaaagaacttaaagggagataaggtttatacaactcactgaaactggtaaaatgacaacatcagtatattgcgataagttacgtatatataatgtaataactagagaaactactaaaaagctacattaaaatatacacttaaaaacaccactgataaaccaaaataaaattctaaagaatgttaaagtactccacaggaaggccagacaatggaaacagatagaagagaaaaagagagaacaagccaacaaaaaagaattcagccctaacatatcctaattatattaagtgttaatggtcttaatatgctaattaaagacagaaattaacagagcagattttaaaacatgacccaattagatgctgcttgtaagaaattaactttatttatgttatgttttgttttttggagacagagtctctctctctcctccaggctggagtgcaatggtgtgaccacggttcattgcaagccccacctcccagattcaagggattctcctgcctcagcctcctgaggagctagtattacaggcacctgccaccacgtccagctaatttttgtatttttagtagagatggggtttcaccatgttggtcaggctggtcttaaactcctgacctcaggtgatctgcctgcctcggcctcccaaagtgctgggattacaggtgtgaaccaccatgcccagctagaaattcactttaagtataacaatacaggcaggttgaaagtaaaaggatcatcagacacggtagctcacgcctgtaatcctggcactttgggaggccgaggtgggtggatcgtgagcccaggagtttgagaccagccgaggcaacataaccaaaccctctctctacaaaaattacaaaagaattagtcaggtgtgatggtgccagcctgtggtcccagccagctacttgggaggctgaggtgggagggtcacccgagctcaggaggcagaggttgtagtgagctgagatcgcatcactgcactccaccctgggcaatggtgagaactggaaaaagagaaaaagaaagaaggatggaaggaaggaaggaaggaaggaaggaaggaaggaaggaaggaaggaaagaagggagggagggagggaggagatagaaaaatatgtatcattgcttgagcccaagagttggagaccagcctgggcaacatagtgagacctcgtctctataaaaaatttaaaaatgaggtgggaggatctcttgagcctaggaggtccaggctgcagtgagctgggattgtgccactgcactcccacctgggtgacagagcaagaccctgccaaaaaaaaaaaaaaaagatatgcaagtattaatcaaaagaaagcagaagttactatattaatatcagataaagtaggcttcaaagcaaagacaattaccagtggcagacagaaacatgatataatgatataaagtcaaaccacccagaagacagtaacactaatgtatgcaccaaacaataggactgtaaaatatgtgaagcaacaactgatggaactaaaaggagaaatagacaaatcctcaattatagtcgaaggcttcaacagcctctcttaaagggaggtgtacaaatcctacctccctttaaatcattttactctctcctgtttataacataattgtcttaaacattgcctctacttacatttgagagccatgtcagacagtgttataattttttattaaactagcaaacatgggaagaaaagtctactgtatttacccaaacttttcatgccatgttctttctttcatatgttccaagattccttcttttgtcatttgttttctgtttagagaacttcctttagtttctttcttttttttgatggagtctcactctgtgacccaggctggagtgcagtggcgtgatctcagctcacttcaacctctgcctccgggttcaagtgagtctcctgcctcagcctcccaagtagctgggactacaagcgtgtgccatcacaccctgtaattaatttaaaaattaataaaaataacttttttatttttagtagagacggggtttcaccatgttggccaggatggtctcaatctcttgacctcgtgatccgcccaccttggcctctcaaagtgctgggattacagacgtgagccaccgtgcctggccctccctttagtttccttggggtcactttgctggtgacaaattctcctagtttttctttatccaagaatgttttgatcttccctatattgttgaaaaacgagacataagatcagcaagaatatagaacagcgtatcaactaacaggagctgatcaacatttatagactgctccacccaacagtagcagaatatacattcttttcaagtgtctttggaatatatatcaagatagacttggaccataaaacaaaactcagtaaatttaaaataattgacatcacatagactatgttcttaagccacaatggaattaaggaatcagcaacgaaaaggtgacagaaaaacctcctaacacctggaaattaaacaaaacatttctaaataatccacagatcaaagaggaattttcaaaggaaatccagaaatacatggaactgaatgaaaataaaaatacaacatagcaaaaattttagaacacaactaaagcagcgctgataggaaaatatagcactaaatgcatatattaaaaaagaggaaaagtattccatcttaaaatcctagaataaggctgggcacggtggttcacgcctgtaatcccaaaactttgcgaagacgaggcaggcacatcacgaggtcaggagttcgagatcagccttaccaacatggtgaaaccccatctccactaaaaatacaaaaattagcagggcttggtggcaggcacctgcaatcccagctactcgggaggccggggcaggaaaattgcttcaacccaggagccagaggttgtagtaagccgagatcgtgccattgcaccccagcctgggcaacagagggagactctgtctcaaaaaaaaaaaaaaagtcctagaagaagaacaaaataaactcaaaacaaggaactaatagagataagaacagaaattgaaagcagaaaaacagtagagaaaataagtgaaacaaaaggtttgttctttgaaaagattaataagattgacaagcctctagcaacactgacaaagaaaaagggaaagaagacacagattaccgatattaggaatgaaacttggaatacccctgtagacccttaacaaaagtataacaggaaaatacgatgaacaacactatatacataaatttgacaacttagatgaaatgtatcactttttagaaaaatacagttacaacttacccaatatgaaacagataatttaaatagcccgatactattaaggaaaatgactttgtaatattttattttatattacattatttttaaaagacagcgtcctcattatgttgtccaagctggagtacagtggctatgcacaagtgctatcatggcacactgcagtcttgaactcctggcctcaagccatcctctcacttcagcttctcaagtagtggggactataggcctatgccaccatgtccagctactttgcaattttaaaactcccccaaaagaagtcttcaggtggccaggcatggtggctcacatctgtaatcccagcactttgggaggccaaggtgggtggatcacctgaggtcaggagttcaagaccagcctggccaacatggtgaaaccccatctctactgaaaatagaagacattaaccaggcgttttggctggcgcctgtaatcctagctgctcaggaggctgaggcaggagaatcgcttgaacctgggaggcggatgttgcagtgagccaagatcgcaccactgcactccagcctgggagacagagtgagactccatctcaaaaaaaaaaaaaaaaaaaatctccaggctcagaacactgccaaacatttaataaagaattaataccaattctacacaaaatcaaacattcactcatggtaaaaactcttgggaagaaaataggaatagaaagtgaacctccctaacttgatgaagagtatctataagaaacctacggctaacattaaactcaatgatgaaagacttagtgcttctcacactcttattcaacatactgctagaagttctagcctgtgcaataaagcaagaaaaagaaatgagagacatacagatcaaaaagggagaaactgtccctatttatagatgatatgattgtccacatagaaaatcccaaggaattggccgggcgcggtggctcacacctgtaatcccagcactttgggaggccgaggcgggcagatcacgaggtcaggagatcacgaccaccctggctaacacggtgaaaccccgtctcctactaaaaatacaaaaaattagccaggcgtggtggcggatgcctgtagtcccagctactcaggaggctgaggcagaagaatggcgtgaagcaggaggcggagcttgcagtgagccgagatcacaccactgcactccagtctgggcaacagagcaagactctgtctcaaaaaaaaaaaaagaactgcttaggtataaatcttataaaaaatgtacacaaggtttgtgtgctgaaaactacacaatactgatgaaagaaagaaaaaataaataaatggagagacacatcacattaatacattttccaaaacatagtaaagattttaattcttcccaaattgacatacagatttaatgtgctacctataaaaattccagcaagattttttgtagatagagacaagcatatttcaagacttacatggaaaaacaaaggaactagaatcattggaacaaattttaaaaagaagaacaaagtgggagagatcagtcttcctgatttattatatatgagatatataagacttattatgtaatatatttacaataatcatgactgtggtattggcagagggagagacacatagatcagggcaacagaatagaagactcagaaaagactccacaaagatatgcctggctgattttttgtttttataatagtataaatcaattcagtggatgaaagacagatgttttaaccaagattgttggagcaattggacaaccataggcaaaaagaaaaacaaaaggaacctcaaactaagtctcacactttacacaaaacaaactcaaatggatcatgaacttaaatgtaaaatgtaaaaatataaaactttcaggagaaaatatttaaaatctagggctacgcatacggttctcacacttgacaccaaaattatgacccataaaaggaaagactgatacaatggacttcattaaaatttaaaactttctttctgtgaaagactctgctaagaggatgaaaagacaaactacagactgggagacaatatttgcaaaccgctgtctgacaaagagcctagaacatataaagaactctcaaacctcaacagtaaaaaaaaagaaaaaaatccaattagaaaatgggcaaaagacacgaaggtacatttcatcaaagagggtatacaaatgacagataagcacatgaaaatatgttcaacatcattaaccattagtgaaacgcaaatgaaaaccacaatgagacagcattatacacctatcagaatggctgaaagaaaaaaccgtgacaccacccaatgttggcacattggatcacttatacattgctagtgggagtgtaaaatggtacagccactctggaaaacagtttgccaatttcctttttttttttttttttttttgagacagagtctcactctgtggcccaggctggagtgcagtggcgcgttcttggctcactgcaagctccgcctcgcaggctcacgccattctcctgcctcagcctccggagtagctggaaccacaggcgcccgccaccacgcccggttaattttttgtatttttagtagagacggggtttcaccatgttagccaggatagtctcgatctcctgacttcgtgatccacctgcctcggcctcccaaagcactgggattacaggcgtgagccaccatgcccggccacagtttgccaatttctttaaaaattaaacgtgcaagaaccatgcatacaacccagcagttgcactcctgggcatttatcccagggaaatgaaaacttatgttcacacaaaaacctgtacgggaatgtttatagcagctttagtcataatagctcaaaactggaagcaacccagatgtccttcaacaaatgaagagttaaacaaactgtagaacattcaggcgatggaaaactactcagcaataaaaaagaatgaactgttgatacacacgactcccggatgaccctccagagaactgcgctgagtgagaaaagccaatcccaaaagtttacacgctgtatgcttccatttacacaacattctatgtatttatttagagacaaagtctgtctctgtcacccaggctggagtgcagtggcgcgatctcggctcactgcaacttccgcctcccaggttcaagggattctcctgcctcagcttcctgagtagctgggattacaggcgcccaccaccatgtccggctaatatttgtatttttagtagaaacggggtttcaccatgttggccatgctggtctggaactcctgaccccacatgatccacccgcctcggcctcccaaagtgctgggattacaggcttgagccaccgctcccggcctatataacattcttgaaatgacacaattacagaaatggagaacagagccgtgggttgccaggtgctgaggaggagctgggcttggagggaagtgggcgtggccataaaaggatgcctggagggatcctcatggtgacggaaatgttccgagtcgatgttaatctggttatgacatcttattataggtttgcaagatgttatttaccattgcaggaaactgggtaaaggatacacaagatcactctgtgttatttcttacaactgcatgtgaatccacaattatctcaaaataaaaagtttaatttaaaaaagtttctcgatgacaagatctgatattctatatccacagtagaatttaaactgaaatctggccaggtgcggtggctcacgcctgtaattccagcaatttgagaggccaaggcgggtggatcacctgaggtcaggagtttgagaccagcctggccaacatgacaaaactccgtctctactaaaaaatacaaaacttagccgagtgtggcggtgggcgcctgtaatcccagctactcgggaggctgaggcaggagaatcacttgaacctgggagatggcggttgcagtgagccaagatcacgccactgcactccagcctggacaacaagagtgagactccatctcaaaaaataataataataattaataaataaataaattgaaatctaaaaggctgggcacggtggctcacacctataattccagcactttgagaggtgaggtgggcaaattgcttgaggccagaagtttgagaccagccatggccaacatggtgaaaccgtgtctctactaaaaatacaaagattagcctctactcccagctacttgggaggctgaggcaggaggactgcttgaaaccgggaggcagaggttgcagtgagccgaggtcacgctactgcactccagcctgggtgacagagtgagattctgtctcaaaaaaaattggaatgtggaaatgtggctaagagtctctctttttttgagacagggtctccctctgtcacccagtgtggagtgcagtggcctaatcacagctcactgcagccttgaactcctaggctcagacgttcctggcctcagcttcccagcggtctttgttgtaggcagcttgaaggattctcattggcacagaagattaaacaatgcctttccattttaataaatatctgcaatcaaaataaacaatgttcagtcagaatcaccttcttcttcccctccctttagccttcactccctgaaagctacggaggatgcccagcttccacagaccgagttgctgccgagagcatccagacgcagccagggagccaggaaccactgccatcatcttggaggaaactcagagaatgggaactggagccagacgccaaaggcaggcaaatgtttgaaatgttgaaaaggggccgggcgcagtggctcactcccagcactttgggaggccaaggcgggcagatcacctgtagtcaggagtttgagaccaccctggccaacatggtgaaaccccgtctctactaaaaatacaaaaattagccaggcgttgtagcaggcgcctgtaatcccagctactaggaaggctgaggcaggagaatcacttgaacctgggaggcggagcttgcagtgagccgagattgcaccattgcattccagcctgggccacagaatgagactctgtctcaaggaaagaaagagagaaagaaagagagaaagaaagagagaaagagagagagagagcgggcgagagagagagagaaggaaggaaggaaggaaggaaggagagaaagaaagaaagaaaggttgaaaaggaggaactgttgttgataacagaaaatgtaaactggtgagcctgacatcaaatcctggccgacttccagggtggaggaggacacagatggccggagaggaccagggtgggtacctaagtcaccaggagcccacatggttctctaagaagcagttgtggtggctgaacgtttgggtctctacagggccacctggctgggaaacacagggaaaagccaggaaccctggatgtaaatgttgctacggcatttgaacatcactcttggacattcttgtgctcagataaaaaatcggggctgaccggcagcctagcttgctggaggggaggtatagctgattgaatacacagaccaaaatgtggggttggcttgaaaactgtcaggatgggccacgtgtgttgatccacgtgggattgcacagacgcaccctgtgggttcttactgtaaaacccctgcgtctgggaaatgctttgtcttcgtggcacaaactgttcctctgttccttttgtctccaagtcccctgttactccagaagtcccttctcccaagccttttcttttttcttttcttttcttttctttctttcttttttttgagacggagtctcgctctgtcgcccaggctggagtgcaacggcacaatctcaactcactgcaaactccgcctcctgtgtagctgggattacaggcaactgccatcatgcccagctaatttttgtatttttagtagaggtggggtttcaccatgttggtcaggttggtctcaaactcctgacctgaagtgatccacccgcctcggcctcccaaagcgctgggattacaggcatgagccaccgcgcccagccctcccaagccatttctctggatcctgaagctagagaagacctcagagaatggtctgatgctgcccagaaaccacaaaggtggaacatggtgcatccctgttttacagacaagggaggggactgattcttagggaagggaagtgacctgtcctattagaacccaggcgtcagctctccacccatcttcacttggtcaaagttggaggaaagggggccttcagcagcaccaggagggaatgataaccaggcttccctgtccagcgccctcccaccatccccgcagccatggcccagttgagatcttccatacctgggacatgcagtcagtcatcactgatccagccatctgtgttgggagcctactgtgcatctagaacagcctactgttctagatggcgagggaagagggacgaacgcaacagacacagaggtccttgccacagtgctcctagcccagcttgagcagccagtgccccgccctgccttcccctcatccacggcctctgtggtctcctggttgcacacagagggtcctattaacctccggaggccaggaggtctgtgagtttgggcctcatattcaggaaagatctacttcaactttcaagattttgtagacccaaacacgggtctacaaatggccgttgcatggtagttgtgtcagaagtgttagtttgatcaatgtaaactatttagaatgcagaatggctttgctacccctatttgatatttcttcacgctttcaatataaccaagccttatgcacctgctccaggtaagcaccctgtcctggctgtgacttagtggccccctcgggttggggcagcttccatgagctcatgcattttattttatttattttttcatttttattttttgagactgtcgcccaggctggagtgcagtggtatgatctcggctcactgacacggccgcctcctgggttcaagtgattttcctgcctcagcctcccgagtagctgggattacaggcacctgccaccacacccggctaatttttttctatttttagtagagatggggtttcaccattttggccaggctggtctggaactcctgacctcaggtcatccacccaccttggcctcccaaagcgttgggattacaggcctgagccactgcgcccggccagagctcatgcattttaaaggtgagaaagccaaggcatgtcttctccccctcccccagctcagccccctcacaaaacatgcacaggtgcacacaagcatacatgcatgaacatttgcctatgcacacatgctgaccgtgcacacacacatgcacatgcacactggacaactgcacacactcccgccccagaccctggctgtgccctcctgtgagtcacaaggtgactcacaggcacctccctcctctctgatcttcagggtaggggagagacagtaaaagggagagggagaagagatgtctcaaagccaaacctaagaaagtgactttgggtccagctggggcctgagggacaatcagggtcagggctggggatccagggtgtcctgcctgtgccagcccggaaaacaaggcacatcagcaccaagtcaccaaggccctccttctctcacaagctcccctccctgtgggctctttccccgcctgctggacccaggttccagctggaggggaggaagccactaagatgcagtgggggaaagtgatgccctcacaaacataataccacgacaccacaccccgggacaccccccagtcaccacccacagcctcccagtggcttcgtgggggatgtgggttgttcagactgcagccagcaatcaccaataaccacctggccccaacacatccctggcctagacacaaagtcttcaaatacccaggcctttttttttttttcagacagagtttcgctcttgttgcccaggctggaatgcagtggcgcgatcttggctaaccgcaacttctgcctccctggttcaagcaattctcctgcctcagcctcccgagtagctggattacaggcatgtgccaccacacctagctaattttgtatttttagtagagatggggtttctccatgttggtcaggctggtctcgaactcccgacctaaggtgatctgcccacctcagtctcccaaagtgttgggattacaggcatgagccaccgcgcccaacctacgctttttttttttcagcttcaatcacctgggcttgagtgatcctcctgcctcagcctcccaagtagctagaattacaggaatgtaccaccacgctctttttttttttttttttttttcggttgtagagatggggtttctccatgttgctcaggcttgtctcagactcctggcctcaagcaatccaccagccttggcctcccaaagtgctgggactgaaggatgagccactgtgcccaaccttcacctggttctttacatgcaatccctgggaaggctgtgtagacagagtgggaagagtcacttggcttcacagacggaagcctggaaggggcaaggcaggatttgaaacccagggaggggctgggggttctggagcgctagcttccagagggtggaggccaggtcaccgctgattttggtggtcatgttacctgtaccccacccgggccataacctccatggagtgagcggcaggtgcgctgggagagctgggggtctggggtcaggactgctgggggtggggcgacctggccaagtcagcaccccacccctgcctcagtttccccatttgaggaatttgccattgctgactcttctgaagctctattataccaggactcagaaaagaaaatgagggtaccctgaggctgtctgcagctgggctgactgatggggggacctctaaggatgcttccccgctgttcccctgttgctgcccccaactcagctgccagggaaagacgcccaatatccccatttcctcaaagccccctcctcatgggagtcctcctctgggctgaaccctggactccattctcctctcctgtcctggggggctgggagggaggtgaattgggcctgacctgagcctcctggggagatggggcttggagagtagggtcagccctgggtctagaagcttctccctagcagtgcccagctgcttcccaggccatagacaggtggcctggagcagggctggggcaggcctcaggcggcccccacacccctgcttccgccttgaatagcagaaacattcctacatctgtcatgggaagacggccagctccgccttcacccaggaaaccaaacattcccgctgtgcccagccttcttcccacaaagtatcagggcgttcggggcaccccaccccaccccatggccaaggggcaggtgtgtgggagaaacccccaagacctgagacctcagcttctgctgcagatgcctgctcccttcctacacacacacacacacacacacacacacaatactaccagcaaaacacagacatactcacaggtgcaaaagctcccagccacacccacagacagctgtacacacacgaacacacactggccactcaccacagacccacagagagggggtgcaaacatgcacacacagtgttgttccctgcagctgagctcccagagaacggagatcctgactcagtagtgctggtgcacagtaggtctgcagtgagtgcccttcggcacctaccagctttgaacctcagtgtgaggggtatattcctccatccactccgttgccctcttccgccgctaggctgtgagtttccatggacaggatccttgtctggggcacagctgcatccccagaacgaacacaagacttggtacgtagcaggtaccatcccacaggatcatggtcctgctgtcactcctccaatctcccaaaccagcttccaagtcactgcctgattcttcaggagaggagaggtggtcttgccatcctgccagaacccagggcaccgagcccctcctctctcacgcactcaaagtcaccactatctgacccctcacccctgcaccctcatgtccccagcctgccccgcccttctcccaggacatggtcctgcctgtcctgcctcctgccctggccatactcacttccctgccgcagtctggccagcctcaaggtcaagttcactgtgccaggtgtgagggtgaagaggacaccctcagtccctgtctcagggagcacaaggcaaacaggcaatgacaacctagggtggggacaagggctctgatgaggggatgagggcacgtgggcagctgtgggggtccgaggaggggatacgcagtctgtggccttgcttaaggaggagcagagacagctgggctccagaattcaagcacttgaccaaccatcatgctgccctcaaaccatgtctcctgtcccagaaacaggtgagggagcagtgaggcctgctcgacagctgggcccgggactctgctccgaaacatgcctgttgctttcttctctctggctacagtttatttcatcctcactcaaggaagccctggtctccgggagaaaggccacattagtcctcctcagctgaagccttcacagtccacagagtaatttcacagcccctagctcctttaatcctcacaatagtctatggggacagatgtctctgccttcattttctttctttctttctttcttttttttttttttttgagacaagagtctcactctctggcccaggctggagtgcagtggtgcaatcttggctcactgcaacctccacctcccgggttcaagtgattctcctgcttcagcctcctgagtagctgggattacaagcgtgtgccaccatgcctggctaatttttgtatttttagtagagacggggtttcaccatgttggccaggctggtctcgaactcctggtctcaaatgatccacctgcctcagcctcccaaagtgctgggattacaggcgtgagccacctcacccaccctactttcatcttctagatggtgggaagctcagagagttgtaaaagccaggtaaaagcaaacatttactcggctgtgtggcagtgaattctataggaatgtgtttggtgtcaggtcaaagaaaaatccaatttatagtggtttagggaagaaaaataggcgttaatctttcttccataacaagaaatcaggaggcagtaacgcttgccttgatgatggcagggctggatttcctgcaatctctttgtcatccttatcatctcattactacagaatggctgctgacccgccaactgtcacatctgcattcaaggcaggaagaagggaaacaaggaaagggcagtctccctggaagtctctgtcttctgatgaggatgagtccccactgtcaccctccctgcacaccccacagacttcctctcatgtctcattagccagagtgccgttatatggccacactcagacccaccatcggtccaggagaatcagatgcccaggactgatgagaccagcctctggcactgagatcgcagcatttcagctggttccataagcagaccagggctctgtttagcaagagaaataaggagggatggctgctgggcagggtctgccctcccaaaaattgccacaggaagcagttcccaggcatagtcccatttgatcctcacacaatctcataaagctgagacgattctctgccaatttagcagacaaggagacaaagctagcaaacagcagagctggcacctagacccaaacctgggttcctcaccactctgccgcctgcaggtcaccagaggcctcaaatgcacggggctgctgccgggtgtcagttacatccgcctcacctgcacctgccgtctcttggctctgagtgtgcaggtcagggtacttgagtgcccaggtactgacaggtgactgcaccatgcagagctccatgtggccgctgtgcactggagagctttgcccagagctatgggctgagcccctgccattggttccttcatccgtccagcgtctgcaggccccaggcaccaaggcaggccttaggaggcacaggcgcagatcctgacctcaaagacagactttggcacccagtgccttcctaattcaaggagatcttgggtagaatgtttgaatgcattcagagaagaaaaacctcacttctggccagagagctgcaggagcaggtttttttttttcttatttctttccccaactttttattgtatttttgtttgtttgtttgtttgagatagcgtctcactctattgcccaggctggagtgcagtgacatgatctcggctcactgcaacctccaccttccaggttcaagcagttctcctgcctcagcctcccgagtagctgggactacaggtgcccaccaccatgcccggctcatttttgtatttttagtagagacagggtttcgccacgtttccctggctggtcttgaactcctgaactcaagtgatctgcctgcctcggcctcccaaaatgcagggattacagacgtgagccactgcgcctgcacttactgtgttaaaatacacataacaaaaaatttaccattgtaagccaggtgcagtgactcatgcctgtaatcccagcactttgggaggctgaggcaggcagatcacaaggtcaggagttcgagaccagcctagccaatatggtgaaaccttgtctctatgaaaaatacaaaaattagacgggtggtggcgtgtgcctgtagtcccagctactcgggaggctgaggcagaaatattgcttgaacccgggagatggaggttacagtgagtcgagattgggccactgcactccagcctgggcgacagagggagactctgtctaaaaaaaaaaaaaaatgtgccattgtaactgttttaagtgtacagttcgtagtattaagtacattcataatgttgcgtgaccatcgcccccattgtctccagaactattttcattttgtaaaactgaaactctgtatccattaaacgctaactccgcaatcccccctcccagcctctggcaaccaccattctactttttgtctctataattttgactaatctaattatatcatatgatggaatcatacagcactggcacttttgtgaatggcttctttcacttagcagaatgtccttaaggttcttccatgttgcagcatatcccaggatttccttccttttgaaggttaaataatattccattgtacgttgatatagtttggatgtttgttccctctaaaatcatgtggaaatgtaggctgggtgtggtggctcatgcctttaatcccagcactttgggaggccgaggcaggcggatcacttgaggtcaggagttcgagacctgcctggccaacatggtgaaaccctgtctctactaaaaatacacaagaaagtagccggacacagtggcaggcgcctgtagtcccagctactagggaggctgaggcaggagaatggtgtgaacccaggaggtggagattacagtgagccgagatcgcgccactgcactccagcctgggcgacacagcaagactgggcaacagagcaagcctccttctcaaaagaaaaaaaaattttaaaaaagtctgtggcggccgggcgcggtggctcacgcctgtaatcccagcactttgggaggccgaggcgggtggatcacgaggtcaggagatcgagaccatcctggctaacaaggtgaaacccgtctctactaaaaatacaaaaaattagccgggcgcggtggcgggcgcctgtagtcccagctactcgggaggctgaggcaggagaatggcgtgaacccgggaagcggagcttgcagtgagccaagattgcgccactgcagtccgcagtccggcctgggcgacagagcgagactccgtctcaaaaaaaaaaaaaaaaaaaaaaaagtctgtggcacccctgccccccactctctcgtgcttctgctctcaccatgcgacatgcctgctccgcctttgccttccgccgttattgtaacgtccgtaaggcctcaccaggagcagacactggcgccatgctggtacagcctgcagaactgtgagccaatgaaacctcatctttataaattgcccagcctctggtatttctttctagcaataccaaaatggaatatcgctctgtcacccaggctggagtgcagtggcgcgatcttggctcgctgcaacctccacctcccaagttcaagtggttctcctgcctcagcctgtcgagtagctggaattacaggtggccgccaccacgcccggctaatttttgtatttttagtggagacagggtttcactctgttggccaggctgaacaacagagagttggctggccaactctcgaactcctgacctcaggtgatccgcctgcctcaacctcccaaagtgctgggagcacaggcgtgaaccaccgtgcccggccatgcttccaccttttggctattgtgaatcattccactg

SEQ ID NO: 854 - DNA, 617 bp, Homo sapiens
  Genbank Accession No. AL036753
  misc_feature (1)..(617): n = a or c or g or t
gggtcgggaggtcgacggtatcgataagtttttttttttttttttttttttttttggagggagaaaactgatgtcttctatgcatccgattcttaacaaaactgcagggagcttgaaaaaatgcagactgtacaaacgcttacaaaaaaaaaaactgtgaactgacttaagatcagagtttacttttcagatcaaattgtttatggttttacaaatgcgatttctacttgccaactttttttttgtaacttgttcccttatacctccttgattgaataccagacagcctagacctcagtacaaaaggtattgaaacatttttgatacataacagacctcagtcttttttaaaaattaatatattttcaggcgtatttttgtacagtgaaaagggaacattcttgctgtgttttttcagtaagactttcaggcacttcttcccttttgatttcttttttttcctctgttttttagcatgcaagtatgttggtacgttatgtcctgggtttaaaaaggattaaaactttaaaataatccntgcatccaaaggccttgntggnttaaaaaaaaaaaagcaaacttttttttgnacagctatagtanagatttggntcaaa

SEQ ID NO: 855 - DNA, 699 bp, Homo sapiens
  Genbank Accession No. AL037368
  misc_feature (1)..(699): n = a or c or g or t
anagaaaaaagaaatataatttccatattcattcttatagagcattgaaaaaacataattggtagagaaaactgatagaaggtaaatagaaaaacaggttttaatatagtcaganaatgcataaacacaaaanaaaanacctaaatcacttgcttataacanattttattctcttattttcatactgaactatgtgtgctattttggatacatcagtgatggtttgtaatgtagtgaataaatgcaatttgctaagaatacaagaaaaaagagaaacctatattttaggaataccatggctctgtcagtatcacacatatgaaaatagacatattctttatatgtttttgtgtgcctttccctaagtcagggaatgttattcagactagcagctcatcacggtggggctatgattgtgcttagctagtaggaagtgctgctcttagtagacacatttagcatagagaaaacccggcttctcaccatctccgccttatctatccacttgtaaacaccatttaacctttacataagactatcttccatggtcataatcatcagattgaaactcagagcaaagccatgctgtgtttcttcccagtccatttgtttccaaggaaaaaaaaaatctctgtatcccnacatccttatgacattacactgaaatttttgaactcattttccagcgctaaaatctga

SEQ ID NO: 856 - DNA, 795 bp, Homo sapiens
  Genbank Accession No. AL037594
  misc_feature (1)..(795): n = a or c or g or t
ccctntctgccttngcaagcacttcacatgattactgaacatgagcagacagaaacccctgcccttcttgggggcttncatcctagacaagtgccagcggccccagttgatgccacgggcaggcaatgtgcatagccatggcacgtgccgtccctgtggattcggatgcctcctcccctgctggggtgaggcagccaaccaggggccaactgaaaaaatgctggactctcggtcaaggacagggctgggagagtgccagtctccacaaactgtggatccactagagggttcaggcctggggcatcctctgcaagaggatcccacgagagtccattccccaccacaggcctccgctgctcactgctgtgccttgatcggcctggacgagcccgcccacacctccatcatacccagtgtgaagaggggctggggacccaccactcctgagaacagcatccttgggaagacccagctgtgagtgcacagcaggcacagtccctcaggcccaggtgaggattcagcagcagatgggattccaccccatctgtggcctctccagctgtccacagggccctgcaaaggcaggggaggtgggcaaaaggccaagcccaaacccagccccttccactcttgggggtaccccangaagggaagggcgccanggcccggcttgggttcccaacaagcccccattcaaccctgggnaaggttgaatgggaaaggccccaaaacccccaagcccccttggcccttgggaanggccccttggggttgnaagncctttggccccccaac

SEQ ID NO: 857 - DNA, 497 bp, Homo sapiens
  Genbank Accession No. AL037805
  misc_feature (1)..(497): n = a or c or g or t
ttttttttttttttttttttgttttaaactacaaaggatgttgcatacactgatgaatctgtatctgactanaagtgctcaggggttggaaggngacagaaaacaaaggcaaaatttgcattgcctttccatctgaaatgaaaaactgcacaactattaaccaacatttaataggataatttttaaacagctcatgcgtcaacaagataaatttctttctagacaagagacaagactgaatccaataaaaagngtcatagctccagttgggagagaaaaaaaaaaaactacagaatatttatgatagcattacaaacaggatcctacgcaactatgcaaaagaggttgcccacatttgtattgaacaaangctttgaattcttgcccttccactcttctcttgngactttctgngctgtcagccctagtattcgctgtcaaccacaatactaagctgtaggacaaatccagnggtccaatgaggctgattacacctt

SEQ ID NO: 858 - DNA, 622 bp, Homo sapiens
  Genbank Accession No. AL037998
  misc_feature (1)..(622): n = a or c or g or t
tnactttttttttttttttttttttgcaacttanaaaccggttttactctgctgcaaacaaatggacaagatattgtacaatatgtaataaaaagtacagcataatacaagtgccactaataaaagaaacttaaggataagacttaaaaatgcttatttgttatatatatatacacactgcaataaaaagccacaataaatacacgaatttccacgtcattcataataaatactgaaaatataaatacagaagactacagctaatatgaataaattattacaacataaggnccaggttaagttctgttgaatattattgnagcttattttatataccctttggcatttttgatgttataacttatacacaagagaaatcaatctagaaactgtgtgacatacaacatgacatcttaatgtaacatgactgtatgtgtggactggagttgattttcctccttttcaactgttctaagtcattggattgaacataactaataaatatctattgaagtactgttgatattgagtaaaagtaacaatnaaaatcagttgaaagataaaactaatcataaggggcacaaaaatncagttcantggcttttctgagtttttaaagggt

SEQ ID NO: 859 - DNA, 703 bp, Homo sapiens
  Genbank Accession No. AL039400
  misc_feature (1)..(703): n = a or c or g or t
agaggggcgcnctttttttttttttttcagacaaggtaccattttattccttataaaatatatttcatattgttgctgtaaaaacattacatttcacatttttaaaaaattttttaacagtaaanataatacttggcagacagctgaggaaaaaggcgccaataagacaaactcacagatgggatttatctccctcttgctttttttttttttttttgcccctggtaaaagtcanaacctgggatgaccaaaaagtaacaggacagatttctcccagcaaatcagtctccacaaccaaatgaatattgttctccaaggagtcaagctatagactcacaatgacaacgtggccatggctcaaaacactctctgaaattacaaaattgctttctgagccaatttaaaagtcacatgattgaatccaagctattttactttaaatgggtccttttgctttgcacctgagacctcgcttggccacaagacgtcattcgctgggctccctgggcactaaatgagtgtccagcatccttaagggggctcaacacacagccccagactctgaatatgattccaagaaatattctgaaaaaagtcacatcgctggaataaacagtttcccaaggataactgctttggaaaaccantcccgttagtttctaaaagnccaccctanggcaccttccttccaanaaantcctgc

SEQ ID NO: 860 - DNA, 375 bp, Homo sapiens
  Genbank Accession No. AL039445
  misc_feature (1)..(375): n = a or c or g or t
antagacggncgccctttttttttttttttttttttttttttttttttttttttttgggttaactactggctttgttgcaataatcctcnaataccacacagtggcagcttttggcatcataaaaatgggacataactgaagggaaggcttcacacatcacaaagaccgggttggttaatgactaaatctcactacatgaatacgcaatcttaaattactgtgcttatcagccatttctcgcattcatgtgtaaaaaaaaccatggagacgtgtccctggagggcaggttgtaaactgcaacagttactaggaagtcagtcctttacatgctcgtaacatgggcgagctcttganangggatctgggtggcanga

SEQ ID NO: 861 - DNA, 537 bp, Homo sapiens
  Genbank Accession No. AL039870
cttttttttttttttttaaaagggagagtgaggctttttattgtgtatgaattcacgtggtatcgacaactccacacaatattaaaacactgcgagaaagtgggtgcggcacacctggaattttaaaaaagtcagaaataaaaacaaccagacatcccaatgcagatggcatagaacctgctagaaccacaggcggcggctggaaacaggagacaggtctttacgaaggttagatgggcagcggttccgtggacagaggaggaggcgcggctggccggcatatggcttctgtgcagagggcctggcctcaggccgtggactttttaataagtgaccccttgaggaagggcgtggtggctccacctccacccggaagcccccccgggtcactcacgggcggacaggtgtgtgacggccctctcctacctgccccagaacttgggcaggacgggctgttaacttggagatggatgcgtggcctggaggcctagcgttgcgcctcggacacggtggccggcccgtcaaagggaccacgca

SEQ ID NO: 862 - DNA, 525 bp, Homo sapiens
  Genbank Accession No. AL039917
  misc_feature (1)..(525): n = a or c or g or t
attgactccgtctcaaaaaaaaaaaaaaaaaaaatgtggtcagatacctatcgggatcagcctcttctggtggggtgggacaggcagcagctccaggccgcgcccccagcaccgaccacgcgtctctaagcattggtaggtgtcgactgcagggctcattctgggtggaggaacatgattttattggttctttcagttcaccacatccgactcgcgtctcggccctggcccgccttgcggaccttaaagcagtcagtccagggtttgggggaaacgtgctcacccgacggcagctcacaggaccccggagagtcctggcatggtatctcggtccggactctccgctgggcccacgaaggagaaaggctgcctcggattcctgcgcccaagccaaggtccggcgcccacggaggcaagtccggtctcacggtgacctcccgctggggccgccttngccgccaaccatccagttcttcctccaggccacgttctcctgcgtggtcgctgcctcctgcaagaggtggg

SEQ ID NO: 863 - DNA, 557 bp, Homo sapiens
  Genbank Accession No. AL040063
  misc_feature (1)..(557): n = a or c or g or t
gtttattcttctcagctttctctttaaattcccctaaatagcgccccatttgggaacagagcaagagtgttgaactgaagaccaaaatgccctcaaggtgtaaaataatccgagggggaatatttgctgggcgtcaggaaagactcagatgaaatttcaaccctgatggttttcggtgatccaggaagtcagtgagacaatctctctatatgcagagccctttcatgttaattagaatggtatggacaaaccaatgaaaacaagagggaaagtgagaaagatcacccatgattctgtttcactgtttgctttctcctgtcatggttaagagaaatgtgcaattcgatcctcaatcagtgggtggaggataacagggtagattcacttgtgtgcacttgtacagttgtagctgcgaagtccaagaagtcctctagagcatgtgtactggcactgagttggtgagacagttgtgggagtatcccattctgatgagtacagaaaaaaaaagaaaaagaaaagaagagaaaaaattaagaaaaaaatcaaanaaggaagga

SEQ ID NO: 864 - DNA, 735 bp, Homo sapiens
  Genbank Accession No. AL040178
ttttttttttttttttttttttttttttttttttttttttttttttttttttttctgattaagtttaccgtgttatatgggagcggttcatggcgccccgaaacaattacaataatatatcaaagatcactgatcacagatcactataacacatataataacaatgaaaatgcttgaaatattgcaggcaattaccaaaatgcagtggagagacccaaaatgggcacatgctattggaaaaatggggccaacagatttgcttaaagcagtgttgacacaaatcttcaatttctctgctttgcttttcttaacctattgctgtcacatatatgtcccaaaaccttcaatttctttaaaaattctgctacctgtgaagggcaataaatcaaggcatgcctgtatactctctcctgttatcctttctccagcctctgcacccccctcagcctcagcccctctgcacccctgcccctggcaccttcccacacctgagctctgcgttgtcaccctggggaaatgccaccctttagggaagtctccaacttattcagtctgtaactgtcagagcatacagatggctcatctatcttaacagttactgcatgtcactggtacttaattcagtcagccactcagccttttggggagcatttgttgagtgcctactctgtgccaagggagagctaatattgagcataagcacaggattcttgccttcagggagcttacagtcta

SEQ ID NO: 865 - DNA, 665 bp, Homo sapiens
  Genbank Accession No. AL040912
cttcaagaataaaatgcaccatcagtatttggagagtttggggtctcagatactgatataccatcagtgtttacacccgtaaagccaaattcaacagtacaatttatgttaaacaacatcacttcaagatggctaacaatacaaatagagagaaaagtgggggaaagctttaaaaatgtgttagtttgaagcatatgaaaatgtacgattaaaaactacatcatacaaacctgaaatcaaaaatgttttgtggaacatcagttagagttatactcacttgcactgttatttattgcataaagtctatgtggttcatttccttcatattgatgaattgaggatttcaggaaaaccatggttataaaaatgatcaatcttgaaaaagtatgtacagataaatgtaaaatcacaaactaaaaaatatccctacccctggccctcaacttacaaaagggaaagtttcccatggaaagttcgttccactattgccctccctcccccatcccatgtccccaatgctatctttttctgtctcgtacaagtaaatgaccttgaagggaagaaacaaaagccatctttatgaggctcccattgtcatctgtatcagtttgaaaagcatcttggccggtgtggtggctcactcctataatgccaacactttggga

SEQ ID NO: 866 - DNA, 716 bp, Homo sapiens
  Genbank Accession No. AL041815
caattttattgtttaaaaaaataaacgttacatttgacatagaaaaagacattttaaaaatgttcttaaaaggtttaaaaaggcatttgttctggccaggcatggtggctcccgcctgtaatcccagcactttgggaggccaaggcggatggatcacctgaggtcaggagttcgagaccagcctggccaacatggtgaaactccgtctccactaaaaacacaaaaaatttgctgggcatggtggtgtaatcccagctactcgggaggccgaggtaggagaatcacctgaacccgggaggcaaagtttgcagcgagccgagatcgcgccactgcactccagcctgggcgtcagagcgagactctgtctcaaaaaaaaaaaagcatttgttctgaatgtgcctcatcatcccaggcaggcatctgtaagtttccattgtttccacaaaaaccagtggggttcccctctctggaaaaaagcacgaacattcttgctgcttggcaatgggtggctctcatgcccacacctctccacccaagggaacagtctctctgctcctcacctggcagaagcccagaccctgagtccctagcgcggggcagagcacagaaacatgatccagatgcagcaggccccgcccgtctagttcttctgcaacagcctcttagcactgctccactctgacctgcccggctggaatcacagttcccactccggc

SEQ ID NO: 867 - DNA, 667 bp, Homo sapiens
  Genbank Accession No. AL042492
  misc_feature (1)..(667): n = a or c or g or t
agaaaaccttggctccttccttgtctggaaagggttacttgcctatgggttctggtggctagagagaaaagtagaaaaccagagtgcacgtaggtgtctaacacagaggagagtaggaacagggcggatacctgaaggtgactccgagtccagccccctggagaaggggtcgggggtggtggtaaagtagcacaactactattttttttctttttccattattattgttttttaagacagaatctcgtgctgctgcccaggctggagtgcagtggcacgatctgcaaactccgcctcctgggttcaagtgattcttctgcctcagcctcccgagtagctgggattacaggcacgcaccaccacacctggctaatttttgtacttttagtagagatggggtttcaccatgttggccaggctggtcttgaactcctgacctcaaatgagcctcctgcttcagtctcccaaattgccgggattacaggcatgagccactgtgtctggccctatttcctttaaaaagtgaaattaagagttgttcagtatgcaaaacttggaaagatggaggagaaaaagaaaaggaagaaaaaaatgtcacccatagtctcaccagagactatcattatttcgttttgttgtacttcctttccactcttttcttcttcna

SEQ ID NO: 868 - DNA, 760 bp, Homo sapiens
  Genbank Accession No. AL042923
  misc_feature (1)..(760): n = a or c or g or t
cgngcttggttanggaacccggccgacccacgcgtccggaaaccgaagcttggcggacaagtgctggtcttgcaaaatgcttccaaagccaccttagcctgttctattcagcggcaaccccaaagcacctgttaagactcctgacccccaagtggcatgcagcccccatgcccaccgggacctggtcagcacagatcttgatgacttccctttctagggcagactgggagggtatccaggaatcggcccctgccccacgggcgttttcatgctgtacagtgacctaaagttggtaagatgtcataatggaccagtccatgtgatttcagtatatacaactccaccagacccctccaacccatataacaccccacccctgttcgcttcctgtatggtgatatcatatgtaacatttactcctgtttctgctgattgtttttttaatgttttggtttgtttttgacatcagctgtaatcattcctgtgctgtgttttttattacccttggtaggtattagacttgcacttttttaaaaaaaggtttctgcatcgtggaagcatttgacccanagtggaacgcgtggcctatgcaggtggattccttcaggtctttcctttggttctttgagcatctttgctttcattcgtctcccgctttggttctccanntcaaaattattgcaanagtaaaaggatctttgagtaggtttcngtctgaaaaggngtgggnctttatattttgatccancacacgnttggc

SEQ ID NO: 869 - DNA, 318 bp, Homo sapiens
  Genbank Accession No. AL043089
  misc_feature (1)..(318): n = a or c or g or t
gtgggttggagactcagcaggctccgtgcagcccttgggaacagtgagaggttgaaggtcataacgagagtgggaactcaacccagatcccgcccctcctgtcctctgtgttcccgcggaaaccaaccaaaccgtgcgctgtgacccattgctgttctctgtatcgtgatctatcctcaacaacaacagaaaaaaggaataaaatatcctttgtttcctaaaaaaaaaaaaaaaaaaaaaaaaaaaaaaaaaaaaaaaaaaaaaaaaaaaaaaaaaaaaaaaaggggcggccgntntaaaggatccaagcttacgtnc

SEQ ID NO: 870 - DNA, 636 bp, Homo sapiens
  Genbank Accession No. AL043980
tttttttttttttttttttttttttttttatggattttgaaaagtatttacttagtttaaataaattaattgcaaataaaaattaagctacaatatatagcctgaataaaaatgactagaacaaatacaacacaggacttgctttcttgcattagtcacaaagcatgtgacaatctaaaaaacttcaaaatcaattacatttctttgaaaaaggggtaacagcagttactgatacatcacaactaataaacttataatacaagtttcctgacatgcatttcctgagtgaacccaaatgatcattttttaaaacaaggaagtttcgacagttgaagtaaaataaaataattcatggcttctaagcaacaagttttgttttttaaaaaccaaaagaaaattcagaacagttttgtaataggataaattaaaggtatgctaccacatataaaactttgctacagtcagttaagtattatacaacttttcaaactaaaggaaaacaaatcaaaatattaaaagaagatactgtctaatctaaaagtgtactggtttctacaagtgtcaaaaaaagatttgatgtagtgcaactgtctatacttgtggtgcctttgaaaaaagggtgggaaggaggggaga

SEQ ID NO: 871 - DNA, 668 bp, Homo sapiens
  Genbank Accession No. AL044366
attttgctctttttagtctctcacaacaaattttcccctttttttcatgattttcacttcccgttgtaaagttagctcacagtgttgaaatgccctctttgaacacatatttttacttcctcatcctcctctccctgtggtaacccaggcttctctattgtaactaacattcagcaggtatacagagactgcctccactacgtgggtttcaaactgaataactcattgttgggtctggatctgtaaaaaggtgaaaataaataaatcttcttttataactacaggaatgtattctgaattatctgcctcctactgctgttcccctcacagtgctccaagcctgtgcctctctcatctttccaatactatcctcattggtaatttggcaaattcaggagaccttcgccaagtcgaaacaaacatagaataaaattatcatggaggctaaataagaaaaggctgttgatgttggaacttaagaagaaaaaaattagaagtttaactcccactcctctttttttttaaatgcagcagaatcaaccatatttgggcacctacatatcattcacttggccttgtattgatctctgagggtttttttttggtggaagcgggtgggtaaaggggactagtaaatccagggcaattcattaatactgtatatcgtc

SEQ ID NO: 872 - DNA, 760 bp, Homo sapiens
  Genbank Accession No. AL044613
ccaccgtctttgtggcagtagcgatgcaagaatgatgggagctttccgagagcgttcagtgtttcactgaagacaggacccatagccttcatttctggctctgtgtctcctctggcatatggacacatttcctggcatttgcctgagtctacaccactttttgagaacctgaaatagaagggaatcttctgtggcccacagtctccatattggccctagaagactggcctggcggaggaatttgcgttggcttgctttcaggggttagctacaagattcagctttatatctctgttgcttcttggccagtgtagtcaataagggtcttctttaacatctaagatagaggtttggttggccgggcgtggtcgcttactcctgtaatcccagcactttgggaggcccagtgaggtgggagaattgcttgaacccaggaggcagaggttgcagtgagctgagattgcaccactgcactccagcctgggtaacagagtgagactcttgtctcaaaaaaaaaaaaaaaaaaaatctaagatagaggtttggtcaacagtgcttaataataaataagaacctcttgccattctaattttcctgctgcaccccatcccccacacacccctcacggaacattgatataagcagtattaacacagtataaagaatgttcaccttgcatatgtcatttcaggcacatggattcaggaaaagcacagttgagtggaagaaatggtagacttgtgaggcttgcccaggcctt

SEQ ID NO: 873 - DNA, 495 bp, Homo sapiens
  Genbank Accession No. AL044670
tttttttctgttaatttaggcatatagaatattaaattctgatattgcacttcttattttatataaaataatcctttaatatccaaatgaatctgttaaaatgtttgattccttgggaatggccttaaaaataaatgtaataaagtcagagtggtggtatgaaaacattcctagtgatcatgtagtaaatgtagggttaagcatggacagccagagctttctatgtactgttaaaattgaggtcacatattttcttttgtatcctggcaaatactcctgcaggccaggaagtataatagcaaaaagttgaacaaagatgaactaatgtattacattaccattgccactgatttttttttaaatggtaaatgaccttgtatataaatattgccatatcatggtacctataatggtgatatatttgtttctatgaaaaatgtattgtgctttgatactaaaaatctgtaaaatgttagttttggtaattttttttct

SEQ ID NO: 874 - DNA, 485 bp, Homo sapiens
  Genbank Accession No. AL044906
caccacctgggagcaggtttgctcggaagcccagggtgtccgtgcgtgactggacgggggtgggctgtgtgtgtgacacatcccctggtaccttgctgacccgcgccacctgcagtctggtgtgctggccctccagcgagggaacgcccagttggccggacctgctcagtgacccgtccattgtgggtagcaatctgcggcacgacccccacttactgggtctctccttttacaaccaacacaaccgaaatctagggcttcttcttttttttttttttttgagacagagtctcattccattctgtcacccaggctggagtgcaatggtacgatctcggctcactgcaacctccgcctcccaggttcaagggattgtcctgcctcagcctcctgagtagctgggattacaggcgtgtgccaccatgcctggctaatttttgtatttttggtagagacggggtttcagcatgttggtgaggctggtc

SEQ ID NO: 875 - DNA, 561 bp, Homo sapiens
  Genbank Accession No. AL046628
ccttttttttttttttttttttgacagtcacataaactgtgcatgttttccatgttgcccaccctcatacaacactcctgggacacatgtgccagcctgggtagggcaacttcaaggtgctgggccccctccacctgcatccacgccccattcttctccccgaatgtgggtggagcccagtggctcacttctggtgaacaggacacagcaaaggtgatgggtgtcactttccaggtgaagttccggaagcctgtgacttacgtcttgacccctgcccctgccttttctcctttattgccctgaaggagcagctgtcatggtgcaacctgccctgcagagaggccagcagccagcacggagctgaccccaccagtgacctggggagtgcacgaggaagcagttcctgtccgcagagggaggagagtagcccacggacaccttgactgcaggctgagagagggtccagggagcggctcatgcactgaccacagacacaggtaggtcacggatgctgctttaagccttctaattcgtgctaacttgctgtgccgcattacacag

SEQ ID NO: 876 - DNA, 704 bp, Homo sapiens
  Genbank Accession No. AL046941
cggacgcgtggggctttgtacaaatcacaatggtgcacttccaacaaaatatatcaataggtgttttcctctcttattttgtaaatagtattattttagctattaagctggataccttctttcaaattcagccattcagttgtaaagttgggaagaagtttcttgacaagactctgcaattaaatgcttaaaatttggaggggatccttccttgattacatcaagtatgttggtacatgggtttatacaagttcctcttgagaaggcaaaaagaccaccatgtgtgagagctctttgacttggccaataggggcctatcttaatgcacttgtttggacacatttctgatcttatttgtaaaggctgcaaaaggagaggatgaaatgctgtaaaagtaggaaatgaagtggaagctggaagaaaatgtaattggtggtacagctatgggccagatggtggaggggagggtggggacccctgccggcaagcagagtgtcacagctggctttcctcacttgggaaaagggtactgccggtctagcagcctcctctgtactcagccaggacacccagcgcgtgggacctgtttgtgtctgttttgcttccttgggaacggcacagtcactcaccctgccatttgcggaaatgacctggtgcactttgactgttaagcaatgcgttattgctgtagtcaaggttagtgc

SEQ ID NO: 877 - DNA, 706 bp, Homo sapiens
  Genbank Accession No. AL046946
  misc_feature (1)..(706): n = a or c or g or t
gngttntacgtancttttttttaatagcagatagaggacattttgnatacaaatacaggcngaaaaaaaattaacacatgactttttaaagtaagaacaaggaagacaccaaatctacaacttggagttgagagctcagggaattgttttttctttaaataggtgctttcttgggtatgacatggnctgataaaagctntagactttgcagactgacgcaggataaagcagtttccaatgcatggatgaagatggatctgaggtagaaaggtggtcatggctttcctttttatataaaacaattttcttcttttcaaaatatctctgtgcaaatagacacccttgccccccaacccacccaacctattctaaaataatagcaatttctaactttaagcctccttctggccagatcccagctaaagagaacccaaagttaaaatgtctttatgtttttatgtctttaggtttgaatcaaaacatattattttcacctttttttggttcctctacatttgctaattaagtaacatgtttaaactgaatcaattaaatgttaaatcagaagctaaaccaaaatacataattgaatgcactcaaaaggatgtaggaggaggtaccatcacctaagcattaatttcattcttctggagaagcagggacctagacttttggataaacattctttcccaatatattggatcaa

SEQ ID NO: 878 - DNA, 697 bp, Homo sapiens
  Genbank Accession No. AL048304
gcggccgccctttttttttttttttttaattgtaaaaggtttatcaagaaaaaagattcaaggagcagcatccaggaggagaccatgacccccccgggggcaaggggggcagtggtgacacatgtcagcaccccacagcaagctgctggaccacaccctgacctgggtggggaggaggcagaaacccctcggggatgtaaacataggtcagagacagcacaacctgacggggagcaggggcccacattccagcgaggcagacagagggcaggtgggcatggaatccctcgcatggctgggcaagcaggcccctgtctttttcctcttaggtttcccattgtgcaacaggaaggatcttgggaagacagtgccacagagcccaaggaccctgagatcctgggtttggacctgcttccgagtgtggggagttattgctgggtgaactcaaatatacagtcacttttggagagtcctctccaggaaggtgtcaccagggatctgggggcccagggcttatacctcagcaccttggatcccgaggaggggaggatgctgcaatggtcccctgccccgagataagcttgagggcccaaaagtggagggggagtccagaaggcctacaggagggagatggcctgttagcccctccctgcagggacaggtgatgtacggacagccaagcaacatgggaacaagg

SEQ ID NO: 879 - DNA, 824 bp, Homo sapiens
  Genbank Accession No. AL048386
  misc_feature (1)..(824): n = a or c or g or t
agagcggcgccctttttttttttttttttcttagtgcttacaaggaaagctgtcagtcttcataaactttcaaagagttacaaaaatacgtattttttaaactacaattcaagattagcatccaaacctacaaacatgatgtacattcgtcacacaccatacaaccttcacacctggctacagcaatgttgacttacatcaccattgtttatacttgtgaaaactttattgtgcacagtgacatccattccgccagacttaatgttataaagcagctgagcagagcttctcaaagtaaaactagccgtgttgctacaaagggaaattctggctcttggcccaactgtttccataccaatcagctaagtcagcctcctctctgcttctttccatttcaaatgcctgggctttggcctttgaggcaattagaaccagatcagtttaattttacaacactgatctcaactgtatagcaatatagtgaatttgccctgagagtatcaatacattttacaaatattatgagcccagtttatgcatgaagaaataggcacagagaggctacatggcttgtcctttgtcacacagaagattatgttgagtatgaaacttgagcttccgttttagctttccatgtgaatgcccatgtctctccagangtcacctgggagctctgtgcacaagggccaacccacttgggattctgtttggtacttgtactgncctgtcagtttttctgccagcactgaattttcagtacccaaggacttcanccntgatcttcctcgntctccctcaatccngctggccttgatgaaatggng

SEQ ID NO: 880 - DNA, 797 bp, Homo sapiens
  Genbank Accession No. AL048399
gcggcgccctttttttttttttttttaaggaaagaatatatttgaaccacataaacaaacaaaaaggtattacataagaaaaaataatgtaacaatttatgtaagtacctaacatatgagcatgctcttacatctaaaacaaaaaataaaaaggtaacattggtactatatatatatatttgacaagtgtgcattaaagaattctctaatataaaacatttaaaatgtggagaatactttttcaagatacagaaaacaattgttatgataggcacacccacaattcttataacaacatgcttgcgaggataaaatccacctgagcactcatttctcagatgtaccaacgctagaaaagtgttaagcactgaatattgccacccacttttgcaatgtttgagtttcaacactgattgggtatgaatctgaattacacaattaattactgttatttttcagtctttctgccatgttccatatagaaggcatgtatttaatatgaatacttaacacagcaacattatttgtagcaaagcacttccctgtgttcatttttcctttaaaggcactacatttagaaaagtattacaacaaatagtgctttgggaagatctgaaactccaaatcaatgtgctccatcaaccataagtagatctaagaagccctggactgaaaatacacaaatgtaaaaagttgataaaatttaaaggattataaaattgggttaatgtaaaagcaattcaagaatacccagttaaaatcctatcccaatggctacccaatacaaccaagaaggg

SEQ ID NO: 881 - DNA, 796 bp, Homo sapiens
  Genbank Accession No. AL048962
taaaacatttattgcaattcagtgtcaaaagttttttacaaaaatatgccaccgtctggtacaaacaactataaaaaatcagttcatcatgcaagaaaagtgtgcaaataatttatacagaaggactcagctcacacaatattaaataaacatctctgcatgtaattggtctaactttatgctttagttacaatgttcaaccccctctaatacttttcatttaaaaaagtacattaaagcttctaagcttaggacacaggctgtaatatacgcccactttagccatggtgattggcacttggtagaataaagatggcaccaaggattcccaagtatagaatacagcttggagccttctgcttaacagacttgtgcttcgttaattaaacaaacacatctatactcaaagacagaaaaagtcatgtttaaactccagaaataatgtagcagatggagttttaagaagttcagagttttggagcagccatcatttttggccaaatggagcagggcctaagttttgagagattctccagaaagctttgtttgctgagtgaattcaaggacactttgaaaaatgcccagcagacaaagtcatgaatatcatggccccttgctcctggctgcctcatgggaataatccccctttgcttagtaaaagatgaagtttagtggagaatgaacatccgctgggctagaaatgcactgaatctcatagctggtcctgaaggaggaaatggagaagatggattaaatgtacctctgagtctaggggagaggaaacacctgctttcgg

SEQ ID NO: 882 - DNA, 121600 bp, Homo sapiens
  Genbank Accession No. AL049176
gatctcaagttgtgtgctggcagaaccactactctcttcaaagctgtcagacagggacatttaggtctgcagaggtttctgctgccttttgtttggctatgccctgcccccagaggtggagtctacagaggcaggcaggcctccttgagctgcggtgggctccacccagttcgagcttcccagccactttgtttacctactcaagcctgggcaatggcaggtgcccctcccccagcctcactgccgccttgcagtttaatctcagactgctgtgctagcaatgagtgagggtccatgggcataggacccaccaaaccaggtgtgggatataatctcctcatgtgccatttgctaagattgtcagaaaagcacactattagggtgggagtgacccgattttccaggtgccatctgtcacccctttccttagctaggaaagagaattccctgaccccttgcacttcctgggtgaggtgatacctcgccctgcttcggctcaggctcagtgcactgcacccactgtcctgcacccactgtctgacaatccctagtgagatgcacccagtacctcagttggaaatgcagaagtcattcatcttctgcgtcgctcacactgggagctgtagactggagctgttcctatttggctgtcttggctccaccccttatgtacctttttctatttctcctactttaaactggattaattttaatttatttctatgtagccaattaatgtgtaagtatcctaaaatgaattagtcaactactggtacagccaagtaagcttctatcagattcaaccctcttgaaaataacagagtaaggtttggcaaaccatggaccacaggccaaatttgcttgtcacttgtctttgtaaataaggctttattggaatacagccacacccattcatttatatatgcatttctgctctcatgttatagtggcagaattgggtagttatgacagactgtatggtccacaaagcttaaaaatatttattatctggccctttatagaaaaagtttgccatcaactgctctgaagaaaatacaataaataatgacacaaaggactgctgagtgagcaaaaaccatggacatgaaaaaaaagaagtgagggagagagtttcccatgttttactccttttagcctgagggtaggccaatgtttggattgtgggaatcgattaacactctgacagatagccagtagtctttctgaactgaagaaccagaagacagagctctggacaaccacagccactggaaagtgagaggataattccagaaaagacagactcagagatggggccatcaaattcctctcaagtccattacttacccctgaaccatgtatatgtgggacagatgcaaagcagccgggctaaataattagaattggcagcttcagtccaatcatgttaatttactgctaaaacaaaaatatcaatattctttaagagaatgcatgagaatctcagagcctctaaaacctagcattcataatgtccaagctgtaatacaaaattgcttgacgtatgaagaaccaggaaaatatgatcgtgtttcaagaaaaaaagacaaccattgaaaccagccaagagatatcatgatgttggaattagtggatgctctagactgaatgtttgtgtctcttccaaattgacagcaggttgaaacttgatccccaatgtgttggtatgtggaagtggggcttttggcaggtaataaggtcatgatatgagggtagagcccttgtcaataggattagttctcctatgaaagagacctcagagagcttgttcattccttccaccatttgaggacacagctaaaagatgctttctatgaatcagaaaacaggccttcaccagacactgaatctgctggcaacttccccttggactatctagccttcagacttgtgagaaataaatttctgttgtgtataagctacccagttttggtattttgttatagcagccgagttgggctaagacagttgacaaggaatataaagcagcaattacaactgtgctcaattaagtgacaaaaatatgcttgtaaccaatgaaataatagcatatatcagcagggaaataaacatttttttgaagagagcaaaatggaaatttaaaactgaaaaacactacataagaaatacaaattcactgcataagcttaatagcagaaagcaaatgacagaggaaagaactagtaaacttgaagattgtgtaataaaaattatccagtgtgatgcaaagagagaaataagatgggaaaaaacctatagtcttagggacccataggacactaccttaaggcctaacacaaatgtaactggagtcccaggagagaatagaatgagtggaaaaaatacgtttgaagatataatggccaaaaatacaacaaatttggtgaaggattccagaaactcagtgaacctgaagtaggataaatagaaagaaaatcatgcatagatacatcatagtcatatttctaaaaaccaaagataatatcttgaagagaatagaaaataataccagaataaacttgaattttcaaggatgaaggaagaacaagagaaatggtacctatgtgggtaaatataactattattcttctctttagttttaaaaatctcttataatgtttgaaaacaaaaattataacactgtcggatggggtttttgatgtatgtaaatgtaatacagacatatctcagaaatattgtaggttcagttccacaccacttcaatgaagcaaatatcacaaattgttttgtttcccagcatatataaaagttacttttctattatactgtagtctattaagtgtgcaatataattatgcctaaaacataccttcatttaaaaatactttattgttaaaaaatgctaacaatcacctgagccctcaccaagtcatttgctttttgctgatggagggtcttccctcaatgctgatggctgctaactgatcagggtggtggttgattaaggctggggtgactatggccatgacaacaatgaaatttgctgcatcaatggactctttcacaaaagatttctttgtgagtgtaatgctgttttgtagcattttacccacagtagaacttcttccaaaattggagtcaattctctcaagccctgctgctgctttatcaattaagtttatataatattctaaatccacattccagcaatattcacagcatcttcaccaggagtagactccgtctcaagaaaccacactctgctcatccataagaagcaactcgtcattcattcagttttatgagattatagcaattcaaacatatcttcaggctccatttctaattcaggttctcttgctattttcaccacatctgtggtgacttcctccactgaagccttgaacccctcaaagtcatccatgagggttggaatcaacttcttccaaactgctattaatgtttatattttgacctcctcccatgaatcacaaatgttcttaatggcatctagaatggagatttatttccagaaggttttagatgtactttgctcagatccatcagagtaatcactatcaatggaagctagaggctcacaaaatgtattccttaaataataatacttgaaagtagaaatgactccatgatccatgggctgaagaatagatattgcattagcaggcatgaaaacaacattaatctcctcataaatcttcatcagaactcttgaatggtcaggtgtattgccaatgagcagtaacattttgaaaggaatccttttctctcagcagtaggtctcagaagtgggcttaaaatattcaataaaccacattgtaaacagacgtgctgtcattcaggctttgcccttccattggtagagtatgggcagagtatatttagcataattcttaaatatactctgcctgtactacaatttttggaatggttaaataagcactggctttaacttaaagtaacaagttgcattagcccctaacaagagaatcttcctgtcctttgaagcattgaaaccaggcattcattgactttttctttccagctatgaaagtcctagatggcatcttcttctgatataagtctgtactgtctatattgaaaatttgttgtgtgtaactatcctaatcaataatcttagtcaggtcttttattttaaaatttgctttagattcagaagcacatgtgcatgtttgttacatgggcacattacatagtatcttacatagtggtggggatttggcttctagtggacccataaaccaaatattgaacattgtacccaataggtaattttttaaccctcattcctctcccaccctaccctgttttggagtcccctgtgtctactatttccatctttatgcccatgtgttcccattgtctagctcccacttataagtaagaatatgtgatatttgattttctttttctgagttagttcacttaggataatggcctccagctccatccatgttgctgcaaaggacatgatttcattccttcttatggctgcataatattccatggggtatatatactaaattttctttatccaatcaaccattgatggacacttaggctggttccatgactttgctattgtgtatagtgtggcaataaaagtacaagtgcagataaatttttactgtaatgatttattttcctttgggaaaggaaaagaacccagtagtcgaattgttggcttgaatagtcctatttttagttctttgagatatatctaccctgttttccatagaagttgaactaatttacattccctccaagtctctaacctttcccttttctcgcatctataccaccatccattgttttttgactttttaataatagacaatatgatgatgtaagataatatctaagtgtggttttaatgtgaatttttctgatgattagtgatgttgaacattttttatgtgtttttggctgcttgtatttcttcttttaagaaatgtctattcatgtaatgtgcccattttgtaatggggttgtttttttcttgttgagttgtttgagttccttgtatattctggatattagtcctttgccagaggtataatttgcaaatattttcttccattatgtaggttgtctgttcactcggtaaattgtttcttttgttgtacagaaacattttagtttaattaaatcccatttgtctatttttgttttgtcgtatttgcttttcgggtcttcatcataatttctttgcctaggcctatgcgcagtagagtttttctttagctattaatagatattgtggatagcttgctacagcttctgcattagcacttgctgcttcatcttacatttttacgttgtagagttggcttctttccttaaaccccatgaaccaacctctgctaacttcaaacttttcttctgcagcttcttcacctctctcagccttcatagaattgaagagagttagggccttactctggaataggatttggtttaagagaatgtcttagctgggtctgatcttttatccagacaagtgaaactttctctgtatcagcaataaggctattttaatttcttatcatttatatgctcactgaagtagcacttttaatttccttcgagaactttttctttgcatacaacttggctaattgttttgctcaagaggcccaacttatgacctatctcagcttttggcataccttcctcactaagcttaatcttttctagcttttgacttaaagtgagagatatgtgactcttccttttacttgaacacttagagaccattgtgggtttattaattggcctaatttcaatattgctgtgcctcaggaaataggaaggcctgaggagagagggagagagatgggaggaaagttggtaagtgtagcagtcagaacacacacagcatttctcgattaagttttccatcttatatgggcatggtttgtggtgccccaaaacaattacaatagtaacatcaaatatcagtgatcactgatcaccataatagatgtaagaaagaaaaggtttgaaatattgtgagaattataaaaatgtggcacacaaagtgagcacatgttgttggaaaaatgggcatcgatatacttgttaatacagggtttccacagatcttcaatttgtaaaaaacacattatctgtgaactgcaataatgtgaagcacaataaaacaaagttcgtctgtatatatatgtaatgactacaacatacagagagagtgtaaggggatccatacagtggaaagatttctatagtacacttgaaatgataaaatattaattttacaattaaaattttggaaagttaactgtgtatattttaatatctacaggaattactaaaaatatacaaatatatttattaaaagtccaatggacaaattaaaatggaatactgaaaaatattcaaatgattacaaaagaaagcaagagagtagaaacagaggaacaaccacagaaaataataaaatcatggacttaaattcttccatattactaattgcatttaatgtaagtggtgcaaaacacacttatcaaaagacagagaaccaagaaagtgaaatatctgtaccctggaaactataaaaaattgatgaaagaaactgaagaagacaaatagatggaaaaatatttgtgttcatgaattggaagaattaatattgttaaaatgtccatattactgaaagtgacttacagattcaaaataatctctatcaaaataccaaaggcattttccacagaaatagaaaaaacaatcctaaagtttgtgtggaaccacaaaagagccaaaatatccaagcaatcttgagcaaagagaacaaagctggaggcatcacactacttgttctcaaaatctacttcaaagctatagtaatcaaaacagcatggtactgacataaaaacagacatacagaccaatgaaatagaatagagagcacagaaattagtccatacattttacatccaactgatttttgacaaaggtaccaataatatgcaatgagaaaagaatagtaccttcaacaattggtgttggaaaaactaaatatccacatgcaaaaaaaaaaaaaaaagaaagaaagaaagaaaaagaaattggacttttatctaagaccacacacaaaaatcaactcaaaatggattaaagatttagacataagacctgatgctgtaaaactactagaagaaaatacaggtgaaaagtttcttgacattaatttgggcaatgatttcttggctatcacaccaaaagcacaggcaaaaaaagcaaaaatatacaaatggcactgcatcaaactaaaatgcttctgcatagccaaggagacagtcaagagagcaaagagacagccaacagaatgggagaaaatatttgcatatattggataagaggttaatatccaaaatatataaaaaaactcaaacaacttagcagcaagaaaaatcacccgattaaagaatgataattgagtagacatttctcaaaagaagacatacaaatggccaacaggtgtataaaaaatgctcagcatcactaatcatcaggaaatacaaatgaaaaccacaatgagatatcacctcacacctgcttttatcaaaatgacaaaagataacaattgctggtgaggaagtggagaaaagggaacccttacacactgttggtgggaatgtaaattagcatattcactatggagaacattacagagattcctaaaaaataaatctaccatatgatccagcaatctcacttttgggcatatatccaaaagaaaggaaatcagtatgtcgaggagatatctgtactcccatgttcattgcagaattgtttaccatagtcaaaatttggaagcaatctaagtgtccattggcagatgaataggtaaagaaaatgtaatacacacacgtatatacacacggtggaaaactattcagcctttaaaaaaagaaagaaagcctatcatttgtgaatacatggatgaacctggaaaatattaggctaagtaaaataaagtaggcacagaaagacaaatactgtatgatctcatttatatgtggaatctaaatcaaagagtacagtgtttcaattagacagggtgaataagttctggagatccattgtacagagtggtaactccagtgaataatgtattgtacacttgaaaattgttaagagagtagatcttaaatatcctcaccacaaaaaaagataagtatgtgagctgaatatctaaattagcttgatttaaccatttcatagtgtatacacacacataccaaaacaatcacattgtgcaccataaatatatacaatttctatttgtcaaaaaaggagattttcagaatgcaaagaaacacaagagtcaactatgtgctgtctatatgaaacccagtttaatataaaaacacaggttaaaaagtaaaaggatggaagatcatatacatgtaaacactaaacaaaataaatctggaagtttcaaagaggacctggtaccatttcttctgaaactattccaaacaattaaaaagaagggactcccccctaactcattttatgaggccagcatcatcctgataccaaaacctggcagagatacaacaaaaaaagaaaactttaggtcaatatgcctgatgaacattgatgcaaaaattctcaataaaatactggcaaactgaatccagaaacacaacaaaaagcttatccaccacaatcaagttggcttcatccctgagatgcaagtctggttcaacatatgcaaatcaataaacataatccatcacataaacagaaccaatgacaaaaaacatatggttatctcaatatatgcagaaaaggcctttgataaagttcaacatcccttcatgttaaaaactctcaataaactaggtattgaaggaagatacctgaaaataataagagccatatatgacaaacccacagctaatatgctgaatgtgcaaaagctggaagcattccccttgaagacctgcacaagacaaggatgtcctctcttactacacttattcaacatagtattggaagttctggccagggcaatcaggcaagggaaagaaataaagcatattcaaataggaagtgagggagtcaaattgtctttgtttgcagatgacatgatcctatatctagaaaaccccattgcttcagcccaaaagcttcttaagctgataaacaactgcagtaaagtctcagggtacaaaatcaatgtgcagaaacaacaagcattcctatacactaacaatagacaagcagagagccaaattatgaatgaactctcattcacaattgctacaaagataatacaatacctaggaatacagctaatgagggatgtgaagaacctcttcaagaagaactacaaaccacacctcaaggaaatcagataggacacaaacaaatggaaaaacatttcatgcacattgataggaagaatcaatatcgtgaaaatggccatacagtccaaagtaatttatagattcaatgctattcccatgaaactaccattgacattttgcacataattagaaaaaaactattttaaaattcatatggaactaaaaaagagctcgtatagccaagacaatcctaagcaaaaagaacagacctgaaggcatcacactacctgacttcaaactatactacagggctacagtaaccaaaacagcatggtactggtacaaaaacagagacatagaccaatggaatagaatggagaactcagaaataagactgcacatctacaaacatctgatctttgacaaacctgacaaaaacaagcaatggggaagagattccctatttaataaatggtgctgggagaactggttagccttatgcagaaaattgaaactagacccttccttacaccatacacaaaaattaactcaagatggaataaagacttaaatgtcaaactcaaaactataaaaaacctagaagaaaatctaggcaataccattgaggacgtatgtatgggcaaatatttcatgacaaaatcgccaaaagcaattgcaacaaaagcaaaaatcgacaaatgggatttaattaaactaaagagcacagcaaaagaaactatcatcagagtgaacagacaacctacgtagtgggttgtgcaatctatccatctggcatctgtgcatagtggatagtgcaatctatccatctggcaaaggtctaatacccagaatctacaaggaacttaagcaaatttacaagaaaaaaaacaaccccattaaaaagtagacatgaacagacacttctcaaaataagacacttatgcagccaaaaaaaatatgaaaaaaagctcaacatcattcatcattaaagaaacgcaaatcaaaaccacaatgagataccatctcacaccagtcagaatggcgattattaaaaggtcaagaaacaacagatgctggtgagattgcagagaaatagggacacttttacattattggcgagagtgtaaattagtttaaccattgtagcagacagttggtgattcctcaaagatttagaacaagaagtaccatttgactcagcaatctcattactgggtatatacccagaggaatttaaatcattctattttaaagatagatgcatgcatatgctcattgtaacactattcacaacagcaaagacatggattcaacccaaatgcccatcagtgatagactggataaagaaaatgtggtacatatacaccatggaatactatgaatactatgcagccatagaaaggaacatgatcatgagttttgcagggacttggatggagctggaagccattatcctcagcaaactaacgcaggaacagaaaaacaaacactgcatgttatcatttataagtgggagctgaacaatgagaacacatggacacaggagaggaacaacacacactggggcctgttagggggacagggggaggtggagcatcaggaaaagtagctaatggatgctgggcttaatatctaggtaattggatgatctgtgcagcaaaacaccatggcacatgtttacctgtgtaacaaacaggcacatcctgtacatcctgcacatgtatcccagaacttaaaatttaaaaaaaatctggaatattgataccagataaagtagacttcagatcaaggaatattattagagatactgagagacattctgtaattataaaggggtcaattctccctgaagatataacaatttaaaatatgtatgcatctaacacagaagtttaaatacttgagcaaaaattgatagaaataaagataaatagacaattatttttggaaacttcaatattcctctctcagtaactgatagaacaagtatactgaatgtcattaaagatacagaagactggagggcatttccaagatggccgaataggaacagttccagtctgcagttcccagcgagactgatgccgaagacgggtgattcctgcatttccaactgaggtacctggtttatctcattgggagtggttggacagtgggtgcagcccacagagggcaagctgaagcagggcagggcgtggtctcacccaggaagtgcaaggggtctggaaatatccctttcccagccaagggaagctgtgatagactgtacctggagaacggtacactcctgaccaattattgtgctttttctgcagtcttagcaactggcagagcaggagatacccttgtgtgcctggctcggcgagtcccacgcccacacgttgctcactgctagcacagcagtctgagatcgatctgcaatgctgcagattagtggggggaggggtgtccaccattgctgaggcttgagtagcttacagtgtaaacaaagagacctggaagcacaaacttggcagagcccaccacagctcagcaaggcctactggctctatagattccacttctgggggcaatgcatagtagaacaaaaggcagcagacagcttctgcagacttaaacgtccctgtctgacagctctgaagagagcagtggttctctcaccactgcatttgagctctgagaatggatagactgcctcctcaagtgggtccctgacccccatgtagcctgactgggaaacacctcccagtaggggctgacagacacctcaaacaagcgggtgcccctctgggatgaagcttccggaggaaggattaggcagcaatatatgctgttctgcagcctctgctggtgttacccaggcaaatagggtctggagtggacctccagcaaactccaacagacctgcagctgaggggtctgactgttagaaggaaaagtaacaaacagaaaggaatagcatcaacatcaacaaaaggacatccacaccaaaatcccatctgtaggtcaacaacatcaaagaccaaaggtagataaaaccacaaagatggggagaaaccagaggagaaaagctgaaaattccaaaaaaccgagcacctcttctcctccaaaggattgcagctcctcgccaccaagggaacacaactggctggagaatgtgtttgacaagttgacagaagtaggcttcagaaggtcggtaataacaaacttcactgagctaaaggagcatgttctaacccatcacaaggaagctaaaatcttgaaaaaagttagacgaatggctaactagaatgaacagtgcagagaagaccttaaatgacctgatggagctgaaaaccacagcacgagaacttcgtgatgcatgcacaagcttcactagctgattcgatcaagtggaagaaaggatatcagtgattgaagatcaaactaatgaaataaagcaagaagacaagattagagaaaaaagagtgaaaggaaatgaacaaagcctccaagaaatatgcgactatgtgaaaagatcaaatatacgtttgattggtgtactggaaagtgatgaggagaatggaaccaagttagaaaacactcttcaagatattatccaagagagcttccctaaactagcaaggcaagccaacattcaaattcaggaaatacagagaacaccacaaagatactcctcgagaagagcaaccccaagacacataattgtcagattcaccaaggttgaaatgaaggaaaaaatgttaagggcagccagaaagaaaggtcaggttacccacaaagggaagcccatcagactaacagcggaactcttggcagaaactctacaagccagaagagaatgggggccaaattcaacattcttaaagaaaagaattttcaacccagaatctcatatccagccaaactaagcttcataagtgaaggggaaataaaatcctttacagataagcaaatgctgagagattttgtcaccaccaggcttgccttacaagagctcctgaaggaagcactaaacatggaaaggaacaacaggtaccagccactgcaaaaacatgccaaatggtacagaacattgaccctataaagaaactgcatcaactaatgggcaaaacagccggcaaacatcataatgacaggatcaaattcaaacataacaatattaaccttaaatgtaaatgggctaaatgccccaattaaaagacacagactggcaaactggataatgagtcaagacccattggtgtgctgtattcaggagacctatctcacatgcaaagatgcacataggctcaaaataaagggatggaggaatattcaccaagcaaatggaaagaaaaaactcaggggttgcaatcctggtctctgataaaacagactttaaaccaacaaagatcaaaagagacaaagaaggccattacataatggtaaagagatcaattaaacaagaagagctaactatcctaaatatatatgcacccaatacaggagcacccagattcataaagcaagtccttagagtcctacaaagagacttagactcccacacaataataatgggagactttaacactccactgtgaatattagacagatcaatgagacagatggttgacaaggatatccaggaattgatctcagctctgcaccaagtagacctaacagacatctacagaactctccacaccaaatcaacagaatatacattcttctcagcaccacattgcacttattctaaaattgaccacgtaatttgtagtaaaacactcctcagcaaatgtaaaagaacagaaattacaacaaactgtctctcagaccacagtacaatcaaattagaactcaggattaagaaacacactcaaaactgcacaactacatggaaactgaacaacctgctcctgaatgactactgggtaaataacaaaatgaaggcagaattaaagatgttctttgaaaccaatgagaacaaagacacaatgcaccagaatctctgggacacatttaaagcagtgtgtagagggaaatttatagcactaaatgcccacaagagaaagcaggaaagatctaaaatcaactccctaacatccaaactaaaagaattagagaagcaagagcaaacaaattcaaaagtgagcagaaggcaagaaataactaagatcagagcagaactgaaggaaataagagacgcaaaaaacccttcaaaaaatcaatgaatccaggagctggttttttgaaaagatcaaaaaaattgatagaccactagctagactaataaagaagaaagcagagaagaatcaaatagacgcaataaaaaatgataaaggggatctcaccaccaaacccacagaaatgcaaactatcatcagcgaatactatgaacacctctatgcaaataaactagaaaatctagaagaaattgataaatttctggacaaatacaccctcccaagactaaaccaggaagaagttgaatccctgaatagaccaataacaggctctgaaattgaggcaataagtaatagcctaccaacaacaatagtccaggaccagatggattcacagccgaattctaccagaggtacgaagaggagctggtactattccttctgaaaatatttcaatcaatacaaaaagagggaatcctccctaactcattttatgaggctagaaccatcctgataccaaagcctggtagagacacaacaaaaaaagagaattttaggccaatatccttgatgaactttgatgcgaaaatcctcaataaaatactggcaaactgaatccagtagcacatcaaaaagcttatccaacatgatcaagtcagctccatccctgggatgaaaggctggttcaacacacacaaatcagtaaacgtaatccatcacataaacagagccaatgacaaaacccacatgattatctcaatagatgcagaaaaggcctttgacaaaattcaacaggctttcatgctaaaaactctcaataaactaggtattgatggaacgtagctcaaaataataagagctatttatgacaaaccctcagccaatatcatactgaatgggcaaaaactggaagcattctctttgaaaactggcataagacaaggatgccctctctcaccactcctattcaacatagtgttgggagttctggctggggcaatcaggcaggagaaagaaataaagggtattcaattaggaaatgaggaagtcaaactgtctctgtttgcagatgacataattgtatatttagaaaacttcatcatctcagcccaaaatctccttaaactgataagcaacttcagcaaagtctcaggatacaaaatcaatgtgcaaaaatcacaagcattcctatacaccaataccagacaaacagagaacaaaatcatgagtgaactcccattcacaattactacaaagagaataaaatacctaggaatccaactaacaggggatatgaaggacctcttcaaggagaactacaaaccactgctcaaggaaataaaagaggacataaataaatggtagaacattccatgctcttggataggaagaatctatatgttgaaaatggccatactgcccaaggtaaattattgattcaatgctatccccatcaatctacccctgactttcttcacagaattggataaaactgctttaaagttcatatagaaccaaaaaagagcctgcaaagccaagacaatcctaagcaaaaaggacaaagctggaggcatcatgctacctgacttcaacgtatactacaaggctacagtaaccaaaacagaatggtactagtatcaaaacagatatatagaccagtggaatagaacagaggcctcagaaataccaccacacatctacaaccatctgatctttgacaaacctgacaaaaacaggaaatgggaaaatgattccctatttaataaatggtgctgggaaaactggctagccatatgtagaaagctgaaactggatcccttccttacatcatatacaaaaactaactcaagatggattaaagacttaaatgtaagacccaacactataaaaaccctagaagaaaacctaggcaacaccattcaggacataggcatgggcaaagacttcatgactaaaacaccaaaaacaacatcaacaaaagccaaaatagacaaatgagatctaattaaactaaagggcttctgcacagttaaagaaactaccatcagagtgaacaggtaacctacagaacgggagaaaatctttgcaatctacccgtctgacaaagggctaatatccagaatctacaaagaacttaaacaaatttacaagaaaaaaataaacaaccccatcaaaaagtgggtgaaggatatgaacagacacttctcaaaagaagacatttatgcagccaacaaacatatgaaaaaaaccctcatcatcactggtcgtctgagaaatgcaaatcaaaaccacaatgaaataccatctcatgccagttagaatggcaatcattaaaaagtcaggaaacaacagatgctggaaaggatgtggagaaataggaacacttttacactgttggtgggagtgtaaattagttcaaccattgtggaagacagtgtggtgattcctcaaggatctagaactagaaataccatttgacccagcaatcccattactgagtatatacccaaaggattataaatcatgctactataaagacacatgcacacatatgtttattgtggcactattcacaatagcaaagacttggaaccaacccaaatgtccatcaatgatagactggattaagaaaatgtggcacatatacaccatggaatactatgcagccataaaaaggatgagttcatgtcctttgcagggacatggatgaagctggaaactatcattcgaagcaaactatcacaaggacagaaaaccaaacaccacatgttctcactcataggtgggagttgaacaacgagaacacatggacacagggcaggaatcatcacacaccagggcctgtcaggtggtggggggctgggggagggatggcattaggagaaatgcctaatgtaaatgatgagttgatgggtgcagcaaaccaacatggcacatgtatacctatgtaacaaacctgcatgttgtgcacatgtaccctaggacttaaagtataataaaataaataaataaataaaatataaaaataaaaaaaaatacagaaaaccaaaacagcactatcaaccacttgacctaactttcatttgtaaaaaacttcacccaacaacaggagaatatgcattctttccaagtgtatatggaacacatatacccaagagagggcatattgtgggacctgcatatgtacccctgaatctaaaatgaaaactatatagatatagataaagtagcaaaaaagaagacatttaaaggaatagaaatcattcaatgatattcatagaataaattaaaattcaataacaaagatatctagaaaatattcaaatattcagagatgaaagaaaacacttctatataaagcaatgtcaggaggcaggagcaagcaatgtgataaaacacattgatttaaaatatgaagctcacagagatgcattgacatacccaaagtcacacagcaaggacagggaaccaggctgactgatttcagtgttggtgttttaacccctccactctcctttactatctgatgtttttcatcatcatcatctcctctcagaatatacaaaggcagatagacaatatcagtaagagtcaaccttctgcggagctgaggatagcctaaattcacaggccctggatattggaggtacaaggtgctcagatatggggaacttaatattggcaagtgtgttgaactaagtgctcctgatgatactcattttgtttttaaaataacacttttattgagcataattcatatgtcatacaatttaccccttcaaagtgttcaattaagcgggtttttgtatattcacagagttgtgtgggttttctccattagccctgtttggggaaattgattcttttgtatttgtgatggtagccaaactttaatgaatggcctattgtttggcaatctctacttccaaaagttaaaccctgaatgttccaccagcttcattggtctctgtggaagttattcacatgagcacttagggtggctccctgaaacaggaacattactttatttttattttgttagctattaactagccctgcccagacctcctacagaaaatacatctgtgaggtactggggagaggctctatcctaccctcctgacattaaagtatcttcagtatgaagctttaaaagagatttaaagtttctgcttcaatcatttttgttctcgttcagacagtggttcttaatctggggccacaacactctggggagccaaggagttatgtgagaaacctgcaaatcagcttgtgaacgaggcttttattttgattaaatatatcttacacacgtttgctactatttctcaatcatacatgggtactgttgtgattaataaaggaaaaaaatcttctgcatatgtaacttttttattatatagtaacctttttcattatatattttctcaatcagcagacactaggagtgcaactactgtcatgggataatcagatagttttgattgataaaataagttatatggacccaaaatgtttaggaaccactaaattaaacaaagacctttcttcatagggtacaaatgtttcatttagtagggcatcaacgtattagcagtcattaacacattagcctgaattaatcagcttgcttcagggtagggcattgaacactttcatcctaaaagcagagtggggatcagcaatggctccaagcaggtctagtgggttagaattagtcttttgggtgccatgtgtgcttcaggaattcgacagtttttatacttataatagtagtcaaactttgatagatgaattattgcttggttagtaccactccaaagagccaaaccccaaatgttctccaacttctaccaatgttggaaaacactccaagggaaaaaagagggcgctgagcaccagagatgggagctaaaaggtaggaggggacagcaaaatatgtggccaagaccaaatttgtctacttcttagtttgttgggaggacaaggagatagtcatatctaccccaaaactttagcagactacaatcttgaaaagacgtttagaattcctttacttttgaggtcctcccttccttttgctctgtcccagaacctccttcgcctatacttgctgacaaactttcccctctcatccaacacagagtcccattttgtatccaaagccattcaatcagctcgaattgtctgtgtttttctggaggggttccctctccaaacttgccagaatgtctcaatattcttggagcttgtcctcagtttccgaaacttcagggcatcccataggccacagttttgacttcaaatgcaaactgaccttttcctttcacccaaacaccctcctccttacccactgcattgcatcagagcattctcaagcctgttgtcttgctccagacatccccttgtctgtggcttggggttaatatctggtcctttccaatcctaccccatgtgattatgcctttgtttcagatccaggagagtaatcatactcagactaggtctccactaaccaaagcaaaagggacatttgagaaaacaatcagttagtccttgcagaaggggtttttggttgcctgacaaccagatagttgcctaaattctcccctctgcctgacatgagttcagggccataagtggctactttcccctgcacaaacacggcaagtgtacaataatgacttcagctgtttgagaagaggccatatcccaagaggtactccagagagctgattttcttagaattgcagagcaaagggctccggaaaactgggctgaatactactagtgtttgcctttctccaacttctgtgtgactgccatctagtggcatgcagggtggtggtggggggtggtggagagtgctccaacagggttcagtcaataagcaggtgcattgtttatgaataatttaaaaacaatattaaaactgactaaagttggtcagacttttattataaccacatgctggcaattctaaacagtcattgataaaatacttctcactttggtataccactgcccccaccccagcacctaagtgattccctcatctccccttggagagccatatttaagcctgacttttcaggtaatacttcagatttatatcccttccctctatcaaaatgttcctgtcttgtgctctaaccccctaaggctgtgctttttattttccttggtggaatttatttatagggaaatatttataggggttaccagctgtctctaccaggggcacctatgttataacagaagttacctgaagaatcaacgctttagtccaatggtgttctaactcttttaaggcagtgaaacactgttttcaaacaaaatatggtatggaaccccatctcctaactcttctttaagtctcaccttcagtgtcatttcctctggaaggtcttccttgtctctccatgatgaggacaagtccccatgacttagtcacagcaccttggactcgccctttcatactacccatcacacgtgttataacttgtctagtgtctgtattccttagtagactgtaacctccatgtgggcagatactgcatctatcttgttcaccattggaaccccagaagcaagtgttgtgcttggcccactgtatgtggtccgtaaatagctgatgaatgaatgaaagcccttctgttattatagcctatgagtaaatgaacattggaaataaccatgtcacgtgttatattgtgggtttttattgaaattatggtcaaaaacaaccccaagatcattttttttttttggaaaaaaagtgtggttaaccagttttcccaccttgtagtcatgtgagtaaaactaaatgcaacagccacaactcccaatttctagtgtgtagatttttcctcctctctttggcactaaagtcaggttcttcttcttactaagttttggctgaagctctgcagggacagtctcctcttctgttttataccaggaccccccaaaaggcttctcctagttggccatctcaggttggcacttccttcaaagacgtgcttaagttccactgtctgattgaagttaacccagcctgagactgctttcctttttcttttaactactagagatcatgaacaaagtgttcacctagttttttaaatttatttttatttattattatttttttagagacagcgtcttgttccgtccttcaggctggagtgcagtgggcatgatcactgcagccttgaacttctgggctcaagtgatcctcctgcctcagcctccaagtagctgggactacagacatgtgccaccatacacagctaatttatttttaacttttttagagatggggttttgctatgttgcccaggctggtctctaagtgattttcctgccttggcctcccaaattgctgggattacaagcataagctatcacacctggtctaatttttttaaaaggcatttactgtgcatttatacatcagtcactctcatgaacactttattaactcatttaagcctgacaagaaacctatgggatagagattattcttatccttattttacagatgagggaacgaagattaagagatgtaggaaacaagaaatacgaattgtttgcgtgtattaactctgtcttctcctgattccctgattggagtgaacctctcaatagttttgaccccaaagttattttgttattaattttggtgataagttgaacagaggtaaacaggtttattgaaggactgaaaagggccaatgcccttctgcagcgtttccttcccctcccccacttacctcttgaggaagagggctccctatgcggatgcattccagagcttcagaattcctctctgagctgctccctcctatggcaacgcccacgtgaatgccagaggacaatggcacagacagttttcaggaacacgtgtagaccatcagccccttcctcctcaccagggcctctggctgccatgcaagctgctacatctcacaataaacccaaacccctggcattttagagaagtagcaggttcagaagtgaaagaaagagaaagtcggaagagcaggaataacattagcactctttgtaaggggagaaggcctggattacattacagatgcttaggaaggacaggtatggcctatttagttggtgctgcctacttctatcatcacccaaaatctcatccctctcattcccaaaactcccttctattgcttccactgccagaaggttttcactcactttagccctctgcctttatttttgtaattggggaatgcattttgagggtaataaagaataataaagtatttaaaagtgaaaaggtatctgagggttaagcaattatcatttatttcacttaagttgcttccttcctaatgccagacagctgccctggagggatttaggttttgattgttgtgtgaggtggttaatggcggagcctgaggttctttgtggaacaaggcaggtgggatagctggatctgaagggaggaatgagggcactgagaatccagagagtgcatgatgacatggagagaggaagctgtcaagtacaaactttgtcttctttgaggttttgcctaggacctgtgccttgcctccctcccatccatcccatccagaaaagtgagaggaaactccctgctcactcctctcctcaccacctgcccctgcccccaggatggagcttaagcgggtactaattagtactatatataacttggctacattcagggttcaagagacttgtgtggactggcctgggaatctgaggatcaaatagaatgatatttcaataagaaaatgcatactgaattctaaacttttggccaatatgttattcttacattggggactgcttatactgggaggcaatttagaattccttctgtctacattaacttgaagtcaggcattgggtctcttgtgtgggccattttgtgaaggctccatacacaccacgttggagcgtaagtattcatacacacagagagaaagatataaagatatataagtattgttttatatatatatatatttatatatatatttatatatatatatatatatatatatatatatatatatatgaaacaggagcttgctctgtcacccaggttggagtgcagtggcatgatcggcatgatcatagataactgcagccttgaactcctgggttcaagtgatccttctgcttcagtcttctgagtagctgggactataggcatgtgcaccatgctcagctattttttaaatttttggtagagatgggtgtcccactatgtttcccttacaggcataagctaacatgtccagcctgtaatatatattatagctattataaatattatatattatagatagcatatgtagaaatatagatattacttatccacaatattgaagtcttagcaaaaatccttcacagcttagtattactgtgaagcctatgccacacatgcaaggacattttgctttaagcatttagaaaaatcgatgtataaatctaatatttatcatttattttgaaagacatcttatggcaaatcagtttacaaagcaaataagacctttttttcatttgtacttattaacacaggttttattagttttctttggagtagggtacagagaaaatgtcctgaaaatctgcctagcctctgcatatttatgtattccctgaactgcttgctctcccaaatggagaaagaatctcaccagatggactcttcacttggcaaatatttactgaatgtctggacgtgctggacattgggtccctaacttctcagagccttccaatctaatcatggagaccatgactgagcaaacatttcatgtttttacatataatggcatgtaaaaggtgaatgccttcaatgttctcaagtctaaaatagggtcaataatgatacttcccacacagggctatggtgaggattaaatgaaaaaacatgaatgtcaattgattactatagtggttggcacaggaaaaatactttggtgattatttcctggaagcatggggtagggaagaactaactaacctgcctgaaggaggtggacaagttttcagagctgagcaatatgagcttttaacaattagtaggtgtttgttaagtagagacatcagggaataaacattccaggcaaagggagctgtatatgaaggctcagaagtcctgagaatgtggtaagttccaggatcccggagttgcctgccatggttggaagatacagtatataaggagaaagggaacatggtggcaaaccaggaggtgagcaggcaaggttccacaggggcagtgatgtttgaaggatgagtagaagtttgccagtcacagaagaagaaagaacactgtagtggtggaaagagcatatacaaaggcacaaagttgtacacgcatatgaaatatttgggggacagtgttctgtaggtggagctctgcattcaagaagctacctctcccatgtggagctttcaaaggtgtctgggcatgtttgctaggctggtggggtgggccccttgatgtcaaattatgtgaggatttcagaggggaatggaagcagtacatgtacccacaaaagaagaggaatttggaaaacagtaatatgtctgtcttggaggcttgtactcagcacagactctgcatactggcaagcgagccctgataaaagggataaaagtagaatctgaatgacttgtttgcacaaaaaactgtgagactctgggacacaggaagaccctgctttggtgcacacaatacacactcaagaactatttgttaactggtttcatgtaaggtgataaagtgtaacatcacaggttgggaggaaagagggtactctctctacttgtgcacaggatctggtgccatttgggaacgctgaggattccagagcatcaccactgtggtggcatctctagaccagcagaaagagcccctaccaggaatagcacagttggcagcagtggtgatatgtgtagccatacaggcagtcaatggactttttttttttttttctagcagagcccatcatggaagtaggtgttggggaggaaaaacttttcctctactctcttaggttcagtaactaggagcctgtggattaaactaacaaaacacagattaatagaagggaaggcacacaatttttgttaatatttacatgtacagaaattcataaaaaggaagtgaaactcaagtggttacacttggggcctttacatccttttaacaaaggaaaggtttgggattcaagggaggataaaatgtaggaaagtgactagaaaatatacaggggaactaatggagggtaagggctagtttggtaaggttggtgtcttagtctgtgttgctataaaggaatacctaaggttgggtaatttataaagaaaagaggttgatttggttcatggttatgcaggctgtacaaaaaacatggcaccagcaaccgtttctggtgagggcttccagtagcttccactcatggtggaagaagggaagctggcgtgtgcagattacatggtgaaacaggaagcaagagacagaggaggagaggccaggctttttaactaccagttctcgaaggaaccaagagtgagaactcactcattaccacaaggacagcaccaagccatttatgagtcatctgttccatcacccaaacacctcccattaggtcccacttccaacactggggatcaaatttcaacatgagacttggtgaggccaaaccatatccaaaccatagcagtctgtttctgcaaactcttcttgttgttgacttccaatcttcaatgattagagtcactcttctctccctggtatgaatgggggtgtattagtccattcttgcactgccataaagatatacatgaaactaggtaatttatattcaaaaaaagaggtttaattggcatatggttccacaggctgtacagaaagcatgatggcttctggggaggtctcaggaaacttacaatcatggtagaaggcaaaagagaagcaggcatctcttccatgaccacagcaggaggaacagacagaggagggggggggggctacacacttttaaacaaccagatatcatgagaagtcattcactatcacaagaacagcaaggaggaaatctgtccccaagatccaatcatttcccaccaggcccctcctccaacattggggattacaattcgacatgagatttgggtggggacacaaacccaaaccatattaggggagcacctttctcaaagggaaattcatccccctgcttttaggcagataaggggaaggcagagaactgtttctacatctgttggttctcaatttcctgcaggtcaaaataatccttctgccaaagtgtcacattttggggtgtcatattctgatcttcttcaagggtcaaagcaagaaaggaatgaaagggtggtaacatgtggtaacagacaggacttgtcagtgcttcctgggaatcacagtgggggcagataagtggagactatagggaagaaaaacctgtaaacattttctacatctaggagaccaaattgacaggactgggtgaaattctgatgtggctaagcagagaaagagggccaagctctctggtttgagttatttgcagtttcctcaatggaggtggagcaatactgggatctatagcccaaagttccagaagaaagtgtgctgggtgtaaagagggactacgcgtagctcagcatgagtgttggcaaccagaggccaaaattccatccagggtgtgggtcaagaattgttgtgagttccaggggtgcagcatggaggcatggcttcttatgcatctcacatgacaggataatctctttttcctcaatattttcaatcctttctataggaccctgccccccacccaatattcagatatggccaaagagctcccacctttaagacaaaatggctttcctttgacctcatatccttctccagctccttccttcaccatatctctccagactctgcagtagaacttttctaaacagttgtctttagctgctgtctccaattcctcatctccccacacacttcttacagtccactcccatgtggtttctgttccaatcactacaccaacacttttcttctgtgttgctaacaccaatgtatacttttctgtctctatattatttgacatctcagcaggacatgacacgtttgactactctcttgaagcactctcatattttggcttctgtgatagcacaaatttagctagtattgggtgcttgagggaatttggtttggatcaacatatgtgacaaaactcttactctgatccctatacaaatgcctgtaaaaaaataatgtgagcagcagaccaaaattgaggccacattgaaaccttctgtacccaatggccttctgtacccaatctcttaagtatcttgacctaaagggaggtcagaaaacaatagccattttcagtgccacgacatccatgaatgtccatggtcataaatgaatacttactatgcgccagacactattctaatcactttatatgcaatgactaaattaaaactcactgcaagattgcaggcaaagggaaataatatcactgttattccattttatagttggaaagactgacaaatacggctggtaagtacagagctgggcttaaaaatctaaatagtctgactgcaaagttcacactcttaaccaccatgctatagtataagaatgtcaaggttattgtgaaaccaccgcacccatccatgacttgttaccctgtccaaggtcagcactgaccagagagtcaattacttatgcaacaagactacagatgatttttcaaaattaacttttttattaatttaaaaatccagaaatacagtgactacataaataagtaccataattaggtacatgtcctgtgagaacagtgaaagggtaatactgttatgttactcttacttgtttacatgagttaactagaaaatggctacaactgctaaatgatgcttatggtctttgttgttccaagtgtttatgatacaaataaatacacaagaagaaccacatccattcttctctactaactacaggcagcttggcctctttaccctatgtcctattctctacacaacaccaaacactggagggtttctactttgacttaacacagctccccagctcctgcttcccacagcattttgcaaaggtgtgtcccagcacctggaggcaggagtatatctagggaaactctctgcgtgttctcttaaggctaagctttcagagaacacctgggtgggaaggctttgggatgaatcatccagaaggagaaacacctctttgccttaggatctagttactagtctccacattatggaatcactgccacctctgggacggagggagcagccgcataacaccttcccccctttaccacacacacacacacacacacacacacacacacacacacacacacacaaactaatgctttgtgacctctcaaccgggatgtactgcttctctcttccaaggagaacgtgtgtgatgtgctggtgagagtcttgtcccaagaaaccctggccataaggcccttgtgtctctttcataagaattgactcctttatgccaggttgtcataaagactgaacattttacattttcccctattggtatcaaaccctcttaggaaagaattctctcacctatagtcatggaatgagacatatggggtttctgggtccttaaaacatttctacagttcattcctgcccctcagagggaacaaatctagaaggcatgcctgagatccttgctgtgaagaattaggtcttcccacaaagatgatttctaaagccagaccccagaatggatagtttatgctctggtattgggctgcaagtagacattttaggagcagccttctctggaattcttgactaaaatatctgcttgatgaataagacaaggatagtaggaaggtttaggataaagatcttcatcagaatatccacctccctaaatgaacaacaattttcttaactgaagagtcaacatgcagatgctcatgaggaccgagccactttgcaaagtaaaaatcaactcctataattggagaagaaggaaaacttcccttttaaagagcttctagaatttactaatttaatataatttttctgaccagacaactatggtctcaaaaatattagtgagtactgatctattacttggtaaattttattgatgtgaaagcaaaaagatggcctttttgaattctatcaacttctttcttcaacaattattttttcttacatggattcagtttctgatgattttactcaatttaacttctttctggaagtcccataggtacagggggaaaagaaaagtggtatcattagggaaaaattattaccacttctaagtgaatgaatgaggctatgaaagtgtttttattctttaccctgactctattgttggtgacttaaacagccacaaagacctaagggcagagcctcttgttcacagttatttactctcctgggcacaaaaacttccaagctacttgggatccagtcaagggaaaagtaacgtagaatcttggctagctttgcttcaaataaagctttcgtttaatgtgagtgtggacgtgcgtgtgtgtgtgtgtgtgtgtgtgtgtgtgtgtgtctgtgagagagggagggagagagagagagagagagaaggagggagggagggagtgaggagggaggatggggagctaatttttttaaaagaacacatgacattctaaaattcaaaggtataatttcatacaagtaattgttctatactgcagaactcctactaagcaattcccttctctttctttcacttgaataactttctagataaaaaccctggggtcttgtttgtctttaacctgtaaagaaatgtgattctccaagaaactagagcagtgttgtgatgttctatccctcctcctcccacatataatttaagactcttctagtctctttggaggagatgttcaagggctgacacaccactccacacaaaggagcaaattatgctgtgcatggcgtgaataattgactgcatttgagtttggagttttagggcactgttgacttaagcaaaataagcctgcagtccagctgcagcttgagttttcttgctttaccctatccaatactgtctgtcttgcctaacagtggcccttttcagatctctccaggtacaaaaccttgactaaatcttcaagctctgttctgcatacacgacttgaacacatctggctgatctgagcttctccttcggtgaagatcttccactggcctaaaaggcaaacaaacgcaaagtggccgggagtgtgtaagaggaaagcagagcaaattaggaatagaaccaatataccccatgcttacccacttactcatggacctaccagggaatttggaatacaaatatcacttggtttcaaaaaatggccccaaaacacttttctagtagcagatatggaaaatgggaaatgaagttttcatttcaacacatagcatttgtaagaatcccaagaataatatagaactgcccctcctcaagagcaaaacctaagtgttattcttggaatttttacagtatatttagcatttacaaaatgcttcaatatctgcttgttagctatttaggcagcttacttggcaccaggtcaaaaaggcactttggaaaacggcacctactgtattactggggctttgcttacccttagggtccccaaatattggtttgggttacttgattactatttgattatatatcactctttcctctattcctgctatcttttgttaaaaacttctcgacgttgctttctcctacgtccacatgctgtccttatacccccttagcaccctaaatcccttcccatggttcctcatccattctcatataccccatggaatccctttccacgcagagtaaacttggctgtagcccttccatcccctgttgtctctgcccaccctggatactgtgttttgtcttctttttattcctgtgctcatggtactgcaacctggagaactcctagtccaagttaagccaactcctcttaagcccaaacctgtcttgaacctctttttcttttccttagccacaagagaataatgacccaccttccctatgggcctgatttctctgctcctttctcccttggatttctcccttttccccattctctatgactcaatgggaagatagaaggaaaaacaaaaaaacaagaagaggatttgggcaaggaaccagctattactgaagccctataatgtgctgggctctgctaggcacattatataaaagagttgggtttgttcttctttgctcctaggtgaccctgtaggatcataccaacttctttcagctacacacagtttgaggcacataccttctactccattatataccccaaatcctgccatgggcacagagtatatctaaatcatcttttaagtcccctggaacctagaacaaagccttgttcacagtatgaactaaaacatgtaacttcagaagtcccataattgatcctaggatcttacactctgcctcctttcttactcacatgtaaggactcccaacttttccatttgaattctcatactgtcctgttattttctatgagtcctgccaaagacaagcaactgactgccttggctctttttctagctgcctattggaccctaactctgctcagatggctcttaagcatattaatttaaacatgttccaagtgaaactctttttcaccaatacctgcttattcttcacagtttccctgttggtgaatggtattactattcacccagtcgagttattaatatcggacccattccaaactcgtttctctctttgatgctgatcttgttgatttaacctcagaaatgtttctcacagtgacgtctcctcccgtctcattgatttaatatagtataattagttcctaattcagactatcccacttctcttaataagggtccacctttcactccacacagcgaggacctctttctaaaaaaataaaaaaataaataaagcagatctgaatgcaccattcacttgcttaaaaacctccactggcattctctggcctggagatcaagtccaatgtcctagcatgataaattgggcacttcataatctggcttcgtcaaagtgtgtgcttaatgtaatatatgcatctgatagccgaaagacatctttccaaagcaccatgttgatatctctatgctatttgcagcaactacagatgctacttgccttacatttgaacattttactggctttttttcaggccctatgactactttctacctccaaatcttctaatcttttagtgcaccttctgtggcctttgtgatcattcctctcccctacccacatttcctgtttgctcctgtctgagtcttctcttaggctgcactcttttcctggactgatttcctgacccattgcccagtcatacccttctctttcaaaacacacctcctccccgaagccttccccgactaagcccacctggctctcatctcattgttctttgcagattcccctgagcactttgatatttaactcctcagaactatactaattcatactgaagtcattttcatgttctgtctcatccattataattccctgtggatagaaactgtgtgccttttatcccattagaagtgctcaacacccgccccaatgcctagaagtatcttagtccctaggctccatctagtgtggaaagtgggagagctgcaagtgtttttgagtgcctgaatgcttttaaggaaacatgaccacccaggggcagttccccaggagtaaaagtgctttcatataacacaggaattgatatgcctttaatttctctttgcctctcatacccaccaccagaggatacacccttccagatgtgaagtctccataaatataccagacctggaatcttatgagctttctccaaccctcttgagactctgtgcttagcagtttcattaaagacattcaggaagccttgacctgaggtatcctatgctcagactacatctgggtttgtattcaccatgtccaagctcttcagattacattcagacaccccattcactgctaagtcacccagaagagagatggaacatcctttagtgttgatactgagcagtgctaatgttcactgagattgcggagggactttagctgtggctatgctaaattgaaaactgaatgtgtttttcagggagcagtcaagagaagtactacttactcagggttgttctggtcaccagcttgaagtgaggaagctcctcaaacatcctcttggagatcttctcaatatggaagtgctggagaatgcctagggccaagcaaaaagtggagcaaatggtcaggcactcaatctggaaccatcaactcctttttttctgctcaggctcagcatatcatttcattactagggcttaagagtatcgagttgggctgtgtaatgtgcttaaccaggaacttggatggctcaagggttataattgactccatttgtttccttggcttactggcttcccctcggcttctccagtggatggagataagggagatagtgctgctgaccatgggactctctcctagggaaagccacatggaatctagcataagtgcttactggagcttctgcagccataggcagtattagaaattctgcacttgcccccaacctggatagactgtgtccatgccaaaccgctgggctgccctcctggctaagcactgagagcctgcagtgggattgcaggcaggttggttttgtaaatggagaagccacccttgttcttgaactcactgaaaagcatattttcctttgggaaatattcacagatcctttagccttccttattcataaatggggagagttaaaatagagtgctctccacagtctcaaccttgcctgaatagcttttatcacaataacaggtagacaactgacaactgccttatactgaaggagcaacatattaccagcccacttaaatgggcgaagtagattaagcctctttttctgtgtccaccaagcatagaccttgataacccagaactgtgaacaagaggatatttagacgctacattagcaagttgaaattcatctgcacacctctgagaggcgaaagatgtgggatgacgaatagtgggcccactgctggggaaacgcaacaaaccagtgcctagtcctaggtgtcctgttatggatgagctagggagttaaagatggcaaatcaacactccaaggcatagaccaaaaataagcatgagtgaatatatacatgttcaagcatcttttttttagggagaaatgcattctttagataaaggctgttgtctaaagggagagaaaaaaagcctcataaatactgagcagtctttttcaaagcatggtccaagtgccacctgcattagaatcatctggctatttgttaaacactcaaatgtttggactctacccaaggtctactgaattcctatctctgggatggggccaggtatctgcatttaaaaccagctccctgtgtaatggtgatgcatacagaagttcgagtactcttgagccttatgtgagagccaatagcaaaaagatgtgtatattttccagctgaaatctcacttatccacttggattgtgaggaaccttgaccacactaaataagcactagtcttgagcctacaaaaagttagaagagctgtaggatcacaatgaacagaatgtggcttgctgtggtagtcactgtgagtaatcagaaaaggaattgaacattgtgactggggtttctccagtaagactataaccttcttgagggcagggatgatgttttaaatttgttttaccccagaagacacatcgtgatattagggacttagctttgccctgaatgaatgggttttcatggttgttgagctttattctggaaagaatgacagactacagtttgacagtttgtaatcctggctacatattacaatcacctgagaagcattatgaacaaacactgatgcccatgccccactccagaccaactaatcagaatctctgggggtagggcccagatatttggtatttaaaggaaaccaaaactctccctgatgattctgatgggcagccagggttgagaaccgcttctccagcttttggtggtgtgaaataggcagctttggaaacccaagggtcagtacttgatctttagcacaggccatcgttaaatttgaaaggccataatgacaatagtgttagatatgtcagtttctaagcaatcaaaaagaacttttaatccaaatgagggaacaggttgaagcaaaattaaagtgagtcctctcatccttttctgtgcccccttacaaagatgagaaattaatgttgtcttgctcaccctttcgaatagtccaaacgtggacctctacctgaggtggtctctcagtctccagtgctatttttctggttgtctccccatcctccatgaatacagactcatacacaggcatcgtttcttccccgcagaagtagcctttattgtcaaagctttggcctggaagttcttctggaatcaggaagcaagtagaattttgtcatggttttctaaagctagaagtgaacttctgcatttatgtatctcattgttcataacatctcacacttatcaaaagtggacaattaacaagaacattcttcgagagacagaaattccacccatacttcattagcccagcttaggctgccactgcaacaagccacagattaagccacaaatcacaaaggagcacgtaactttgattgaagtccatgtgttgacagaatccatagttcttcggaacactagacccctactactgtcactgagaagtggactttcatgaggaaaaatgtagccaggtacaaatctcctaggcacttaagagaacataggaatttccatacagggtcaggatcatgctctgtccagctcagtgttgccaggagaggcccagggaatgggctgaaaaagggccttggttaacatcccctgacatcattttggtatacttagaaaacattcatgacactcatttatgtgcatatacttgcccaaaggatccatccaaattggcttgacatttctgaatgctctttgatttgtttgtaaggggaacaataataccggatcagcaccagtgccaaaatctagatgtcagattagccatatgtatgctatgccaaatgaatggttgggagacacaaaaaattggtcaagtccctcagcgatggatcatttaatgtgtaaactaaactgttgaatttcagctcgcaggcataaaggcacaagctctacatttcactccaccctccctcctctttcctcagtcccctgttttaaaaagtttcttcttgttggttatcagtgagttaagtttgcttgctggccttgtaatcagtactctcttgaactgcgtacttaaagcatacactcaaatcagaacaacagaagccatctgtaagaatatctgaattgttgaggatgaaaccactgagtgttgagtgctttggatctgtgactctaattagggagactcactgttagccaatcagacacatttggactagaagttgtaatcaaattgctattgtatgtctcttggtaacctgattagctttcccacccccaccaccatttggcattgtaaggacaaaaccatagtcttctcttgattccagactgaattactcaatttgtggattattgtggaatcaagctttttgttttcctccttttgtccttctttttagctatttatttacttggtgggccagtctttttggtgataggtaattaagggccacgtgctagcactttttaaatgggttggagagagggaagaggtcactgagtgtacagagacttctgtgtattcaattatcacctttagaatgacagccaaattcatttctcaaactttgctcaccagcttaatattggctacagctatagctgacatgaaatccatgatggcactggcagtacctgtaatatgctaaaagttcttccagtagcctgaagagtcatcttgcaccactacctccttccctacaagagcttaatttacttgaccgaagggatctacaaacaacaaaactcattattgacttaactctggctggtacttgaaaatgctaagaaaagcaaagtttgtctttagaactacctacttagcaacatccgccgtttttcacactctgcacttcaaggtgctttctgatcactatagttcacctactctcattttcttttggggaagacaatgtgcttgatgtcatttctggccatttccacagcccaagagaatgttcccatcctgagccttccagaattccttgcagaagtggtaatgaaggagaagtattattccagctgggacaacttttaagtcttaatagggacttttaatgccataacctaaaaggagtatgtaattatggaaattcaaggtattgggatggtattgtggttgtatgtacagtaaatgctcatgatagcaataacttaagtgtacccttagaatgaccctgtatggcagacgtatctgaatgtgtgttctgagcttgggaatccaggcgtggccaactgggagattatttccttgtctgtgaggaccatctgaaccccaggctcatccctggggctgcacaggggatagaggccttgagttttgggttagatgaaggttgccaggtcgttaaggggagagtgttcagtgaaaatgctatataaactgcatgatgtttgcaagtggttgcagttttcctgcccaacctgctgccactggactgtttctatatgtaaggtggttctcctgtccagcccacctccactggactctctcccctgtatgtcagcccctaataaaaccccatgtcttgtttgctggctctggatcttttcttcggcctcttaaatctggtgccttccctactgaggttaataggagtttggcacgacagtgtgagaagtgagttggggaatcttcaggaagtggacatcttacccaaccctgtaggtggccattgatatgcaaagcaaggtcagcctctaccagagcaaagggaagagagagatgaaactcacatctttaatattggtcctagtttgttattgtaggaggctgcaatcacttgttacaatgaaacttttggctggattatcagtgaattttatttatctcttttcccttttcaacataactgaatttaccattctttcttccttccatctacttctctcctcactgccttgttccttttcttctgtgtcatgtgtcattttttaagaggccagtaatgtcatgatcatcccatttctcaccccttcacgtcattcaggactctattcaaatatctttagagaagccttccctgactactcctttaaaagtgcttcctgccccattcactctctcttgatcctgtttggtttttcttcacagcactcatcacaatctaaaattaccttattgatttgggttcactgtctttcttttctgctagaatgtaaagagcatgctggcaagtagcctttgtcttgttcacatctctgtcctcagtgcatgtaaccgtgtcttgcacacagtaggtacttaaaacaaatttccagattgaatgcatgagcaagtgcatgcctcctgatgctctgcagttgcagagtacctggagcaggtgcccttggctatgtggctattgactctcaggcaatgtgactaaggagtgattcaacatgcagacacccatgtctggctcactgagaggcagatacacagaatgagacagaaattctcttcttccatgttgctcaatcaatcgtctatctccacaaacttgagcagagtgggaaagtgggaaaagcagctcttccagaaaaatcggtttaatcattcagacttcaatatactgccaactgggatactggagggcagttttttacatgataaattttattatgttttctaaatacaaaagtaacacatatttactatagaaaatttggaaaatacaaataaataaataagaaaataagagttacccataattcagtcacaagaaaatggtcactgttaacattttgccgtatgctcctccagtctttttgtttcttttttttgtcttagcatatataaacactttctttctttctttttttgagacagggtctggctgttgcccaggccagagtgcaatggcgcgatcttggctcactgcaacctccacctcccgggctcaacccatcctcccacctcagcctcccaagtaggagtagttgggactatgggcacatgccaccacacctggctaatttttgtatttttggtagagacatggttttgccatgttgtccaggctggtcttgaactcctgggctcaagcaatctgtccgcctcggactcccaaagtgctgggattacaagcatgggccaccgcacctggtcaacgctttcttttttaacacaaaaagttggatcataatatacatattgttctttagcttgctatttttacttaacaaatacattgcaaacatctttctctgccattcaatcttggtctataatgagttttaatggctatattaatattccacggtacagatacaccataatttgtttaatcattcccatattcgtgaactttcagattatttccaatttttcagtattgtaaacagcattgcagcaaaaattcttatttgtatatctttgtgcatgtctgtggttactttcttaggattcctagaagtggaattttttagccaattttttttttttttttttttttgagatagggtctcgctctgttccaggctggaaagtactggtgtgatcgtggctcgctgcagccattgctcccaggcaatgatcctctcacttcagccctcagcctcccaagtagctgggactacaggaggtacgtgccaccatacctggctaattttcttttatttttgtagagatggaggtctcatcacattgcccaggctggtctcaaactcctgggctcaagagatcttcctgccttggccacccaaaatgctggtattacaggtgtgagtcactgcacccggccaccaaatgttttaataaacattaccaacctgagaggacaattgttttaaaagcaatgactgttgtttgtcttgttctcacagctttttgattatttaattttttaattgaatcatctgcatcaataaaattttaagcacacaatgaaataagacttggtctgaaggcctgagattcaaattggaatattatacaatgagagggtttatgttatcatgggtaatttgtgtaaatattagtttttgtctgaaattatcttgttgcattactttttaaactattaagtgttagacccctgacagaagagaaaattgtgttcatgaaactaccactatgtgatactaaaaggtttgaggatccagtgagaccacagacttggaagtcataataggtcattgttgctgggtggcccggatgtccatatcatccttagaatgtgctctctccattggccggatacagtggctcacgcttgtaatcccagcactttgggaggctgaggcgagtgggtcacttgagctcaggagtttgaatagctgggtgtggtggtgcgtgcctatagtcccagctactcgggaggctgaggcgggagaataacttgaaccgggaggtggaggttgcaaggttgcagtgagccgagatcatgccactgcactccagcctgggcgacagagctagactctgtctcaaaaaaacaaaaaataaaaaaaaaaataaaaagaatgtgttctctctgtattcgtaataaatacattttctcataaatttcaatgccccagttctctacaccttatcaaatagctcctgtccttcctgtccacacgctgccccctgtgtactctggaagatgggggttgttacattgaggaagattttgtgtcataaatcagtgcttctcaagctgtaatgtgcattagaatcacctgaggttcttgttaaaatgcagattatgatgcagtaggtcttgagtgggggcctgagagtcaacatttttaaccagctcctagctgttgccagtccataaaccacactttgagtagcaagaccataaatgaccctgggcctacagcagtagttctcaaacttttctgcacacaatgttcacctggggatcttttaaaaatgccacagcccaggccacacctcaaatcaattaaattatagtctctggggatgggacacaggtatatgtagaagctcgccaaggggttctaatgttcagacaagtttgagtaccactggcctgcaggaaaatgctcaataaatacacattgattcagggcatgtttgcctactagtcatgagggactaagttgaagaagtatataatttagctctctacctactttttaaaatgtttgaattttcatctgtgtttataaaaatgctttgcagaagcataagaaatgataaattcatgtgcctgggattgactaaatcatcgactcttcgaatgttggagctgtaagggccccccaaaaaatctactctaaccctctcattctgcaaagaaggaaactgaagctcagaggggtgaagtgacttgttatagatcacacaggaaacctgtggcaagacagagatagaatgcttgattacccatcctatattctgtcaaccccaatattagggactatatttttatttagctcatgttttaaaaactaccatttaaataattaacttgtcttttttatcagtcaatattttctactggcatagaaaaaacgatgggctggaagtgacttgggttataggccttggttttatgattgattagttgaatgaatctgggcaagtcctttgatttttgtacttcaattttcttatctttaaaaaataaataataatataattataggattatagtgttagaagggagcttagagataatttttctaaactttcaattgtacagataaggctgatgaggctcagaatggatatggcacatttccaagatcactcaacatcttaggcttggatcagaacctggtctccttccactataactcacctgcctctcgtcctgtcttaaaagggcaatggatgtgattgtactttgatgggtttaatagtgatataaatgaaagctgctactattcttccttatcatcatgatagcctaaattctctactatttagaaaagcataggtaagttcaacactcagggatacatgagaggtgtggtagacacaagcatatttctgggtagtaaatttcttccaagcaactgccttttcagtctttcaagagaagagagaatgaaattcattattattagaaatattatcattacaattatatgaaaggttatgtttctgatgcctaaagaaagtttagaaagactaggtgagaatctcagtcaaccaaaagcagggcctccaaccaacgcaccttttgcttttttacctggacacaccttgcagcattttccgtctattttttgaggatacttgcaggggtatcgattggggcagtggattttcttacactcttgcttggtgacattacaagtacatagcacacactccacaatgccaaatgcccggaggtttgggtgccaggactcgccatgagaataggtctttccattggaaacacacactgaaagagaatgcagaattagcaattaaaagctaaggagctaaaatggaaccctatattcagaacccaagccctgaactacttaacatatcaagcatcctttgttcttgtcatagccatggggctatgtttaccgagtagtatctgtgaccaaaaaacagcttgggccatattctactctcaggagcttctccagattcttcagcagcagcttctggatgcttataaatggcctcagacatagtaggcagtccataaatatatatatgtatatatatatatatatatatatatatatatatatatatattttaagaccggatcttgctctgtcacccaggttgcagtggtgtgattgtggctcactgtagccttgacttcccgggctcaggcaatccttctacatcagccacccgagtagctgggactaacatgcaccaccatgccgtgcttttttttttttttttaatttttgtagagatggggtctccctatgttgcccaggctggtctgaaactctaagactcaagagatccacttgcctcagcctcctaaagtgctgagattacaggcatgagccaccgcacccagcctatatatatctatatatctatatatatctatatatctatatatctatatatatctatatatctatatatatctatatatctatatatctatatctctatatatctatatatctatatctctatatatctatctatatatctctatatctctatatatctatatatctatatatatctatatatctatatatctatatatctatatatatctatatatctatatatctatatatctatatatctatatatatctatatatcatctatatatctatatatctatatatctatatatctatatatctatatatctatatatatatctatatatatctatatatctatatatatctatatatctatatatctatatatatctatatatctatatatatctatacatctatatatctatatatatctatatatctatatatctatatatatctatatatctatatatatctatatatctatatatatctatatatctatatatctatatatatctatatatctatatatatctatatatctatatatatctatatatctatatatatctatatatctatatatatctatatatctatatatatctatatatctatatatatctatatatctgtatatctatatatatctatatatatatatattttttttttgagatggagtctcgctctgtcgcccagactggagtgcagtggcgctatctcggctcactgcaagctccgcctcccaagttcacgccattctcctgcctcagcctccagagtagctgggactacaggtgcccgccaccacgcccggctaacttttttttggatttttagtagagacggggtttcactgtgttagccaggatggtctcgatctcctgacctcgtgatccgcctgcctcggcctcccaaagtgcttggattacaggcgcgagccactgcgcccagccacatatatatatattctcatatatatatatgagaataaatgaatgcatgaaagcagagttctatctctagtagaatgtaatgttaatattttcagttctatagaaaatttgtatgcctcaagtggatgtgcttccaggcatgaaaatttccttgggagatttgctttccatggaggctagatgcaaaaattactgctcttcccaaagggacagtttcttccggatcctgaagcaaatccattcagaatgtcaaatgctatgagtctgtctgatccaccaacatatataagtatggagcttaatggtgttcggcactgtttggtgtaggaaggaaagtgataagtcaagattgagagggaaaggaccaagccctcctgggtaacttgtgaagggatagccttttatgcctctaatttcaggcaatttcctcagtctcccacctcatactggctatagatatttggctacagctgatcactgcttgcttcacagatatcctttggcagtctgacatttgttaagtgggaagttaagtcattggccccatgtcttctgaaggaccttaaaagagcaagcatctggctgggtgtggtggctcctgcctgtaatcccaacactttgggaggccgaggcaggaagatcctttgagcccaagagttcaagaccagctggcaaacaaagggagaccccagtctctacaaaaataataatacgaaagtcgccaggtgtggtagtgcatgcctgtagtcctagctacttgggaggctgaggtgggaggatcacttgggcccgggaagtcgaggctgcagtaagccgtgatggcgccattacaccccagcctgggtgacagagtgagaccctgttccctccccagacccacccaaaaaaggagcaagcatctaggatgcaggctgaggggcctataaagggaaggggccacaggagtatctttctatgcaaatcaacaccaaatatatctggctcctactataaggcatggagctaggctccaagataactgcacaaggctgcagatggggaagtccgaggatgagttatctccctttttgagagtgctgagacattgtggagatttcaagtcatgactaggactgggtgtgtttcttattattcccatcacctcatcacacccagggaaacctgttggcatcccaatcaacaacatctctagggtgggttgtatcacttcaggctgggctgttggggagaaatagtcccacttgatgcatttctaggaattggctgatttggctgcaagacaatggcctcagaaggatgaatcactgggctagttctttctcatcaagtccactgagtcacattaagaaataagaataatgttagctgccttttcctgtcctttgcaagagctgctagaatactggacactctaactggtcaacccacgtaaagatttccaataacctaaactggagtggctcacaatgttacaatgagacaaaatggagagctgacacctcaactgtgaggtcagggctgtggacaggatcacacaagacaggccagatgtgctgttcactctcctgcccttacctctttttttttttttctccccaaacagtaacgttcccttctagacaatgtgatcaagtggacacacagtatgcttcaagaaaatttaggctggattcaagttcaaaatggtggattcctatcatttctcttatttgatgctaacaaggagccaagtagatatatcagaggaccacattattagcaagagatgtaaggaaaagaacgatccatgatgagcagggcaggcaggattcccagtgttatatagctaggctccatctcccctgaacatttggactaaaggaatagtctagactggatgagactctgcagtggaatggggtgaagttaattctggacagggaaacatagccctctccttaccccaaaaattatcgagatgattttgaatcatccagcttgggagttgggggtggggacaagtgattcctcagtgagctatattagaaaggtcagaacagaactgttgcatccaaatcagtgggggcaaatgaataaatgtaaaccagctggggtttttgtaggacatggagaaaatcaagggatgagcctctgccctgaaattaaagagaccttgtggaaattatgggatttaggattttcaaaatccatttccctacacttttaaaaggctttgaaatactttcacagcaaatggaatctattggaggcaatttagaattgaaaatcaagctatctttacctttcttcctgatttcataagcttttatcagaaatccttggaacttaaaaataataaaatacaaatcaaacacagatcgatagtaagtatttccaattcttctactacatcaccattttccattaatggttttatttcgaatgtttttttaagcctgcaaatttcaaaagcaatttaatttttttatctgtaatctgaaatatacatctaactagtaacagatgtgatcaactagctttggcttgactagctttgttgagatttatggtaggagttctttgtaacggattgtttttcacccatgttattcaatcatttggtttaataatttattacttttaacccattcagaaaactgcttttgatttgttttccctttaaacgaaacaaaacatgtttgtggtttcataaaaggaaacagctgagcccttgctccaacgagctggttgacaggaggcctaaaaaagtaagaagcagtcaattgtttgattgagtttctcctccctgactcctgctactggtgtgtgtgggggtgggggcagggggcgggtggaggccagaaaatgctgtgtaagaagacattggaagctatggaagtctatgggtgcctgctgtagccagttgatcaactaagtggacagcatgtcagtcttaacctgatcagtcttcctggtgctcagccaggtggttttgggatttctcactggattactctttttcctttttaaaatttttaatttagagatagggtcttactttgtcccccaggatggagtgtaatggcacaatcatagctcactgtaaccctgaactcctgggctcaagtgatcctcctgtcttagcctcccaagtagctaggactacaggcactcactaccatacttggctaatattttttcattaaatttttttttgtagagtcttattatgttgcccagcctggtttgaacccctggcctcgagtgatcctcctgcctcgacctcccaaagtgctgtgaggcatgagccactgcacctggattactcgtttctaaggatagtctcatatgctacacatttaaccagaatctgagtgtggggctaggaatatgtatctttaacgagagccccagggtaatctggggtgcattgaggtgtgagaattgctatttctaaggtatagataagagcttcagtgatgtttggcactgagtacctttgaatgttgggtcccctactaaaacacagacaatcactcattctgttaaagacccaagaaattttcccaaatgacctacaatccccagggataattgagaaaatacaagaggctgtttacaaaagggaccggactatgctcttttggctgcatttaaggaagtccaaagagtctcctggagtcacctgactatacccacagacttgatgctaagtgagccacaagtgaatatgggctattcctgggagaaagggtcctttcccagctccagccctgcaaagaccagggctgctgaagccttgttgtggaagtatacaaaagaaggatgccccttaccttgtccatgcttgtgtttgttattgatgacaatttgcacaatggttcctgatgcttgctgggaatccataagagctccccggtgacttctggccccaggaaagcgggacagacctccagcctgtcggcttggtggaggatcatagtgagagcggtggtaagaatgtctctgtaaaataacaagaacaaatttagtccaaaagccaccaatgagatcacagagattaagttatatactagaagtcattcaataattttgatttatagtggtgagctctgatttcagctgcatgcttacctacaccaatagaaatagggatgtggtcatgtacaagcagctgacatttttttcattaaaatttttttttaatgacaacttgccaaggtttatctctcttcttctaaaagataggactagatttacaggcaaacttctcagggagaaaagagccaaaaaggctaaagcgtccttcctgctgccaagactctcacatttcagtttaagagttaagacagtagtctgcacgcaaggcagaatgtgaatagaggctgcagaagaagtaagcagtcctgtgcaaatcagaaggagaaagagagagcttctagttggggagggcttgtgacctgggccacgaaggatgggtagacttttttacaggcagaagttaagtggaatagtccaggcagaggtttacaagttgagaaggtgaagaagagaacatcgagtccataaaagggaacagttgcagaataacattccaaaagtgggttgaagccagatcatggaagactttaaatgacaggctaaggggtgaagactttatttggtaagcaatagaggtgagggcatagaaggctttgagggatttttttttttaaagttagagaaataatgtaatcagaactgtttcaaagcattgaatcctgatcatgcatagggtgaactggataggaggaaaagatgagattcgagtatagtcttgataagatgtacttagactctaaagacaggtaatggcataagatcatacaatgcagtacaaataccctaggtattttataggtagaagaattgatagtacatgacagtattggcatgtaagctctacgaaatcaaggactttttgttcactgctatatctccagtgcctagattttagtgtcaggcatctagaaggtgttcatcaaatacttgttgagtgaacaaaactctggtacctaagaaaagcttagagtcttgtcatacaagtaatctttcagcaagggttcaacacacgtgatgaccagactattgtgctacccacccctctcccaggagctaaagtaggctgggggtacaagaagatgaaatgaatgaagaatggaaccttaaggcttaaagccaagtaagattaattgtattttataggcaattgttaggggtgaaggagggggaacccattaaaaaactctttcacaggcaattgaaaaggaaggtctttatattcagtgacagaaatagtgaggaaccttgggaagatagttatggggtcccctgaccatatcccataaaacactgtttaaagttatgggccacagacaggcatgttgcaaatttcactttgggaagtattattgccctcttggcaggaaggggccactggtaggggaaagggagagtaaacaggagctgaagtaagaggaccttttttagccttttgaaagacaatgttattctatctaagaagagcctatgttggtgcattgctatcaaaattcacacaaataaaaatttgcatcagtttgttttcatgcacatggataggattctcagttcaaatatttctcattcccacaatggctcatatgtccttttctgccataatcactcacattccacaaaggccattataggttgctctgtcctttttgaagtttggcaaagttttgccaaaggaacacatagaggacagtttggctggttggtgtcccactgatcctaaaaagaagcagttggactgggatagaattagagagggaaggttgttgacccaggataagctgcaagtacgagaagttctctgactcatgatggtgaacacaaaatgaaaagccattctttagcaccaacgtctcagacctgggacatataataatggtaggaaaatgatcatgatgaaaaaacaaaatcctcaagaattttgatcacaggccctattgtagaccagtcagtcccccagaacctaatcttgttgaagtcttttgttttacagacagagaaactgaggccaaggaggagaggcagtttactcatggtgataatgaagattgagtttttggagatggtaggagtgtaggagtagggggaagatgaatagaaggaggaagagaaggagaagaaggagaaagtggaagaaagaatgtccaatcaaactcagtggtctataaccatttgactaaaagctggtgcaaagagaagttctttcagatacaaaagttcattcagctacaatgttcacaaccacatataccacatactccactttggctatacactaaaatcacccggtgagctgtaaaaaatactcatacctgggtcccgctctgaggtatccttatgtaagtggtttgggggaaggcctgggcattaggattttatatactccccaagagactctggtttgaagccaaggttgggaatcactgacataaaggattttctgtttgggggctggagtgggtggtggtggtgtgtgattttgatttaagggtaatggttcttttagagttcctcccctaaacaaatgaaagagacttatgaggggccattctgaccttgtaactcagagcaaaggagaaaaaggttattaacgccctgaagttgtaagtgaaattggagcttatcttaaaaattagctgcaactagcctgcttgagagagcgggtcaaaaccagttagaaatgaccatatagctatgatcttttattttgctcagtattttggtattttttgatttacttacttgaaagactgaaaaatatttcaggctttagaggtggctctaaaacagttcttttccagtgttgaaaaatccccactattgtagaggacccccaagaatttcatgttctaaagtctaaaatataagagttttattggtgtagacaagaaaacatcagggtccagaaagggccctcatgtttgtgatactgtactatagattttcaagatgttaccatttggggaaactgggcaaagggaatatgggatctctctgtattttctgctacaactgcaagtgaatctatagttatctcaaaataaaaaaagtttaatttaaaaagcggcttcagaatatattctaatccatacagccattaaaacattgtatcttaatcactaccaacctaggactatctctggctggaagacacttaggccaatttccttcccaaaccattgttctgacagtacaaatgagacatggatttttatctgtttcatgtcgtttctatcccaaacgctttcactttttttaatggtaaatttcaacgtaatctacagggggcaaaaatcagggcttggctgttgtccaaaacaaaattatgcatgctttcatgttttggctttctagtctgcacctacttcttcctccccacataccacaccactccacacacacacacacacacacacacacacacacacacacacacacacacacacacacacacacacgcagacacactccccaccaatggcacgaggaccaattcatgagaaattacaacttagaaatcaaacaaaaactgtttcaggtttttacaaaggagtcatatttgaaccactggttcctcttcctgtgcacttcataaaacttgctaagccgatggttttcagaccacctggcaaaagaaaccagtcagctgtatttctgttgaacagaggttttgctggttcccggtaaataggaacagtttacgaaaaggacagtctcctggataagaaatctgttgttagggctgccttttcttcttgccctgaggaagttgggcctgcaaaggatattcagaagggattctcctattttctcattttaggctggtcaagagcaaacaacaaatttgaagagtttatctctgatttgagacaaattcctgtgcattaaaattaatgaggaaccccctccccactccaccatcacacacattttacgccacctcccacacccattcattcaatgtttatttattgggtgactactatgtgccaggtatatatttttccattactacagatgctatttattattcaaatcatatcccacaatatctatcccttttagaacaaagggaaatatttatttataataaagtgaaaccatatggccattttggtctaccaggcacaaatgtttgtttctaaagataggtcttgaactcctttgaaaatcaataactatttcaagggcccacattctgtacccgaccttttttgctacaggaagtactggattaagtccaggcctatcactaggcctgtcaatgaagctgaaagataagggctggaattgagggcagtgtaaaatgaagtcaagaagaaaggctaattcatggcattaccagcaagactgctaaggtggccatagtgcttagtgtgggggcctctcagggaataagtcacatagcttaaggtgactaaactctaaatttggtttagaatgacatctggttgacagccactaattcagccactctcaactacctaccacaataaaaaataggggctgagaaaaagaggaacagacaacacagaaaactgagactgacatcatctcctgtcaggctctggaaggaatctcacttactataaagcagatagagttgggtggagaaaatctttcctcagggtttatattaaccagcaaacagggaagcctaccctctcttgcaggatgctgattttttgagatgtccagagtactgttctccaaacccctttccccaattcttctgcaactattcagaaacagcagtgttcagaaaataatactgatagagagtaagacaaatagaaatggttccatctcactgctgaagctttgggttgggtgttggcaagctgggagcatgcaagttagaagtggcccatgtgatgaccaggaagcccagcctcagcagcactgtgatgtttgtatgagtcattctactgcatcccctatcaacatcttcctcacatgctcaatatcctcaggcttgccctgtaattccctggactcctgcctcatattcaatccttgctgagatttttctagggttttagaaaatcaaatatattttattacaaaactaattgatgcttataggaaaacatcaaattatacagaaaatataaagtaaaaagtcaaaatctacctttcctcctgcccacttctactcctttaagattagcacacctgacatgttggtatgtgaccttccagattggtttatatgcatttatatacatgcacatacaatttttacataaagaagtgatagtgtacaatttcattctgcaccttgttttgttacttaacatatcttggagctcaattcactttactacatttagatgtaccgtattcttttaacaactgcacagtgtcccattaattggatgtacacaccaagtccctagtagacatttaggttgtctccatttgttttgtttttatgaaaacaacaacgcagtgaatgtccttgcatactttttttgtacaaggatgtgatgaacacctatttatgtgcaatggtcaccactgtgcattttgtatgatagattctttgaatcggaacatctccttttcagattttaagaaatttgtagtgtaaagcttcttagacatatatttttagagaggaatgctattttataaattccttcaaaatacaaaagaacaaaagatgctattacttacatagacagatgcctacttgtgaggcttattctgagattagtgcagagaacagaagggagacatcaccaggctgaagagaggagaatccagactgctacctttcctcttttccaactgtatgactgagagcctaaggcttgggaaagagtttatgtggacatgtctgaagtacctaccaaatcccaccaaaaagatggttgtatcctacaaccctacagaaggtcctcactgttgaggataggagtgacctagcttccttagagaacacataaagacttggcaagtcatcctgaaagagtaccaacttctgacctagacaaagggctggggctatggtttctttgtgcacatttcctgcctccagttaccaattttacagtgtacttaaatggtttccagttggtgatgacattaaaaactttgagaaaagggaagaaaaatggtgttagaaatcgggccttttttttggatttgctagaatagtagccacgaggagaggaaagcttggcctgatgctgtggagtgttgaattatttgagctattcacacttactgcttctctgttggcaggttgccggaagatatcaccatcagaatgttcccatgacagttctccatctcctgtttattaaaaagaaataaggagaaaatcatacattcataaaagggaaagttatcacccttgtgacccagcaacatttttggtactatgatcccaaagttcttgaagtgtttttgcttttgtggctgtccttcaaaaagcggctgtgaaagatttctctgggtgtgcctcatttttcaaaacaactctgaagaaagttgccactttctaaatagatgtcctagcaacattatgcagaatttggaaaataaaaggaaaataatcactttccacctaatttaaccatcactgtcacttttgctcattttacttcgtgacagttaagtgttttgcaggtcataattcacttctgtttaaactaccattaaaataatgagttttgaggatttgatctgtcataatttcttatgacacacctttctctaggtctacatgacccactctttggacagagaactccttatcattatcttctaaagtaactgcttataggaagaatattctactttcagcctctagagcaacaaacacacaagagctgtggatatacctcaactgattaaaaaacaagaggatcatttccaagaatattgcccttgtgttacctctgaccaagcaagcgaatgggaagagccttgtcttagagatgtttgcatcacttgaaatgagtactatttaaattatatatatggctgaagataaacctaatattcaacatatattttataagataaccagaaacacaaaaaagtgtaagtactaagaattttctattctgattactctctcaagccttcataagagtaacacgccgggtgcagtgggtcatgcctttaatcccagcactctgggaggccgaagtaggcagatcacttgagctcaggagtttgagaccagcctgggcaacacagggagaccctgtctctacagaaaatacgaaaactagctgggcatggtggtgtgcacctgtagtcccagctacttgggaggctgaggtagaagaactgcttgagcttggcaggtggaggttgcagtgagccgagatgatgctactgcattccagcctgggcaacagagccagaccctgtcacacacacacacaaaaagagtaacatgttaccagttcaagcatgtagtagtagtgttaggggaaattaggtagtatcataggcttttaagggcttgaaaacgacctaaaaattagtttgatagcaatattagaatcaggcagtgacttataacagagtatgactgtaaatcttcataattcaaatattatctgatgaaaaataatgaattttgaggatttaactatttgctaggttaatcttcataaaacagtaaaacaccactttgattgtataatcgtgtcattccctgatcaaaaccctcagtgggttcccaaccaagactctctacaatcaccccctactgcctacccaatgatctcagctactcttcaatgggaaccctttgagctacttgctcttcactgaatactggactcccattgttgcttccgtgctgtagctcatgttattcttcttctgaaattaccttccatctcccacaccccatagctcccccatgcctgtgaaaaccatttaagttttctctcctctgcaaagtcttcttcaaacactcttacatatttctgattgcctaaaagactaagcatcctgaagttttagaagtatagaggacgtcaagcataactttgtccaactgctccatttaacagatgaagaaaccatggctgagaggggaagtagccattcagagtctaataatgagtttgtgagaattaacaccaaaactctaggttacctggctcccaaataggtatgtccattccataagaaaagggttcattacctgtgttactatatcaccatcatctataacagtgcctgatacatagtagtcgctcaataaatacttgtcaaatgatggaactgggaggccttctctgaccaccctatctatagttccaacccccatctgatatttatgcctgctctttgctttttctccttagcagttattactatcttatatttcttatattttatttattttgtttattgtctgctttcccatattagaatccccccatgacagcagggatttttgtctattgtgtttactgatgtaactccagcatctggggcagtgctgggcacatagtacttattcaatatttgtcgaatcaataaatactaaaacactgtacaatatttattactgttaaatgttttctgggccttccttgtctccctagagagtctgtaaattccttggaatgagagattatgtcttagaccacctctgtatctcctagaccactgcttctcaaaatgtgcttcctggactagcagtatcagcattacctggaaacttgttagaaatgccaaatttcagatcccaacccatacctactaagtcagaaactcaggatgggggctggtgatcctgggttttgacaagccttccaggggattctgatggatgcaggagtttgtgaataaccaggctggagcacttagcatattgctgcgtacacatcaggtgctcaatatatgtattgaattgaactgcagtaaaacatacagaattaagtgcttggtcaatagtatatatactcttttctgcctgttttattccatgtctgagtaaagattgtagactgcaagctgaactctgtggaaaccctgactgactactgtaaaacaaagatgatttcaactatgtttataactagaaaattatgcccaagagtcagttaacatgctttgaacacttcttgggtgaagagcctgatactacagcagaaagaggagaaaatcaggctgggctcttgccctcaggatatttacacccaggttggaggtgatgggaaatcaatataggaaacagcctaaaaacacacaaaaaaagcaaatacaaatgaaatacacatgcttaggagacactgaatgggatgagtgagcagtcagatgtaatcgtagaaagcttcctgaaagaaccattaagtcacatttttagaagtagatactgcacagcataaaccgacagtgataagggcagagagtacctcaaccaaagggagtgacattggcaaaggaccagagctttgtaaacagcaagtcacatactggagacagcaagcaaggtgtggcttgagtagaaacttcagatatgaaaacaagagaaattacgctggtaattgaacttgtagagagaaagggaggagagggagagcgaaggagggagggagaatgacagtggggtgtgttgttgaggtaaataggggtagtaaataatgtgctactatttgatagcacaatagggtgactatagtcaataataacttacttgtacattttaaaataacttaaagagtgtaattggatcatttgtaacttaaaagataaatgcttgaggggatcgataccctattctccatgatgtgttcatttcatattgcatgcctgtatcaaaacatatcatgtacctcataaatatatatgcctattatgtacccacacaattttaagaaaataattaaattgtaaaaagtaaacagtaaaaattcaaaaaaatataaaattttgtaaaaggctgaagaattcacatttgattatgttgccaatttttctgtaggggttcctatgataaaactgatatttgtggaagcctattctggcaatggggtatagactagttggggagtaactcgaatgcaggaggccatacaggaagctgctatagtaatatgtaataggccatgagcatctgtgcaataacacacaagaaggattgaatgagactcctacagatgaaaagaaactgataagaccctgaaggaagatttgatgatggggaaggaaggcaaaggggaaatcagtatctgacaactcttgggttgcaaatctggagagctggggacagtgattgagcagggatgagcttagatttacttgtcccccttgtttcagtgggcagtagtgggtctgggccaaataaaatatgggactagagagacgaatagaaaccagtaaagatttaccagcaaatggcaaaacaaaatgtaaaagctatataatgtggtttcaagcctaatttaagtagtcaaaagggagaaaacaagttgcaaaagaaaaatgatagactagttctcttcatcaaatgtccttttaaaatgtagatttaatgattggtattgacataaaatgtttacttagctggccttctgaaaagttcagtttatttaatttataccctagagtttttaaaaggattttaattaaagagtgtcattaaatacttatagtccagtcagaatctcaaagcattatagaagcacatagcgcctcttacaaatgagcagagaggtaagatggaaaatcaaggaggcaagtcactatcaggcataggagaagaatactaataccctgtaacacaaatcagatgagtgtgtcgtgatgtgtatttgatgagcatttgcagacaagaatgcatacctaaatttcagcacttcattaaaaagtaatggagactatatatatatatatatatatatacacacacacatatatatatacacacatatatatacacatatatatatatacacacacacatatatatatacacacagacacatatatataccatctgatctttgacaaacctgacaaaaacaagtaatgggggaatactaaacctgtattacatatatatatcatctatatcatactaaaactgtatgatatatatatatatatcatctatatcatactaaaactgtatgttatatatatcatacaggttttagtattcctagtctaaaatgctccagaagtttttgagtgctgatgatgctcaaaggaaattctcactggagcatttttggatttggggtttttggattagagatgctcaactggtaagtacaatgcaaatattccaaaatccaaaaacatcggaaatctgaaatacttccagtcccaagcattttggacaagggatatttaacctgtatataaatacacacatatatgtatatatacactatatttatatataagatatactatgtacattataaattatatacattaaatatataaatactaggaactgttagcatttctggtgcctctgagctttcaaagtcatcaaaattgcattctctaaacttcaatgttctattaagtctattaagtagctgctaaacgttttaacatttgaattattctatttaatttaacccataattaaactggaattatcttcttagatgttgacattttataaggctataagtggttctctagacctgggtacagtctgtctggatagctgaaaataggtatgtccatttgcaaccttagatatcatactttgaaaaaaagtaggcaccaataccctaaaaaacctgtttctttgctctttttgtctgatcactggaaagattatctgaatgagatggaggctttttcattcagccaagtctttttgtaaaaaacaaaacaaaacaaaaaacagagattctaatggattcagatggattctaattaattttgagaagcaacaagatataattttaaccaattttttgaactgaaataaaaacaagtgtagtgtactgtatgtcaaacaatattcatttaaccctaaaagccacatgtattgtttattcaaacctcagtcatactctctctgagtggtaccctatgaagctgtaatgggttggctttctagtagtgggagaaagggagaacaagtatttgaaaaatggccaaaagctaggctgaaattcagactgtttataactcctgtggcttccattaatctctggtggcttgagcaggtcagagaggtaaactgtcctctcaaaaggactaagtgtacaatgagattccgagatacccatgaagataagcctcagagagcaaaactatgccagcatgtggccacttttgaaccatacatcataaatagggtagccatagagcagatttatctcagacaactcagttttattgcctgtttttctggcaggcataattattaagattgcagctcttgctttcaaaatgtgcctcggttgagatagtaaattacatagtcactctaatcataaggcaaagggacatgagacaaatccctgagacaggggaaatgttctctgtattttttgaggcagaagttgaaatgagcagaatcagggcaaagtggaagagagcagggaggaataaacccattgtgaagtctctccttaccatgagctgggttccatgggggagcactttaatgccagtgctccataccgaagctagagatgaagaagtgagtagaagcagatgactttagggagcctctgccaaacatctaattctataaattctgctgggagggagcaagtgtgctgaaatttgagagaagctttaaaaggaaactagtataaggattctccactgataggcatttgagcttccaatgatgatatacaacaatacaagaaatctgcaagttttataaagcacaaaattagaaaaaactactttaaatttcaaatggaaccaaaaaagagcccatatagccaggacaatcctaagcaaaaggaacaaagctggaggcatcacactatctgacttcaaactatactacaaggctacagtaaccaaaacagcatggtactggtaccaaaacagatatatagaccaatggaacagaacagaggcctcagaaataatgccacttatctgtaaccatctgatctttgacaaacctgagaaaaacaagcaatggaggaaaagattccctatttaataaatggtgttgggaaaacctggctagccatatgcagaaaaatgaaactggaccccttccttacacctcatgcaagaattaactcaagatggattaaaggcttaaacgtaagacctaaaaccataaaaaccctagaagaaaacctaggcaacaccattcagggcataggcatgggcaaagactccatgactaaaacaccaaaagcaatggcaacaaaagccaaactagacaaatgggatctaattaaactaacgagcttcttcacagcaaaagaaactatcatcagagtgcacaggcaacctacagaatgggagaaaatttgtgcaatctatctatctgacaaagagctaatatccagaacctacaaagaacttaaacaaatttacaagaaaaaaaaaccaaccccatcaaaaagtgagcaaaggatatgaacagacacttctcaaaagaagacatttatatggcccacaaacatatgaaaaagagctcatcatcactggtcattagagaagtgcaaatcaaaaccacaatgagataccatctcatgccagttagaatggtgatccttaaaaagtcaggaaacaacagatgctggaaaggatgagaaattggaacacttttacactcttggtgggagtgtaaattagttcaaccattgtggaagacagtgcggtgatttctcaaggatctagaaccagaaataccatttgacctagcaatcccattactgagtatatacccaaaggattataaatcatgctactataaagacacatgcaccggtatgtttattgcagcaccattcacaatagcaagacttggaaccaacccaaatgcccatcaatgatagatgggataaagaaaatgtgacacatatacaccatggaatactatacagccataaaaaggatcagacagttattttcttaaaaaatacttctttgtcaaatgaagtactttattgtttgggctgtcaatataagatcttagtatttttaacaaaatagctccttgagaaataccaaaacacacacaacggggggaattcctgccaacagtagcaagccaaatctgaagaagagtacaaaattatttgtccagaaaaatcataaatacttactttttaaaaagtgcattgtgagaatgcatgcgtttccaggaggaaatcagaagagagtgaatacagaaactacgagctggatggtacccaccatccacactctgctctttcaatggagatgtggctaaacagatccaagtttatggtgagaaacagaatctttgcttctcagagcagtcccaatgcatctgctggattgttaccatatctggcccctggaaagatggtcatcacacagtctgttcctcccggtagcctcagaaataagagttcccaaatttgctttgcttccccaagttgagaggcagtataatataatggctaagagaacagattggagccaaacagtttggattcaaattctggctctgctccttcctacttatgtgactttgggcaaatgaattaacttctctgtgcctcagtttccttattgctaaaatggagacaataatgcctaccttatagggttgtgaagattaaatgaattagtatatgcaaagcatttagaattgtgcttggcacactgtgtcagctaaatgttagctgctattcctaatcccctttcttcccattctttgcctccacttctttttcctccttctcctcaagggtagcttacacatgggggaatacccggcttaagggactcccacaagtgtgctgtgtatttaacaaagaaaagggcttggatcaaacaaacaaacaaacaaacaagcaaacaaagcctagcaaagataactgcatgcctgcacattgaaaaggaatcatttcatctctaaatcattggaagacagggtcctggagatatttttaaaaatggctagagagatttcttcggctcacaccttctaaactggcttagaatttctcataattatgctagtcctctatttccaattttttaaaaaagagtttgcatcttaattaaaatctcttttctctcttggctaaaaatgaggcttgacaggaaagatatctgcttcattggtaggagtacaatttacaaagttataaagtgaagtcttaaaaatccaagtgcccactgagcgcggtgactcatgcctgtaatctcagcactttgggaggctgaggcgggtagatcatctgaggtaaggagtttgagaccagcctagacaacatcgggaaaccccgtctctactaaaaatacaaaagttagccagatgtggtgagcgcctgtagtctgagctacttgggaggctgaggcgggaggatcacttgaacccaggaggcagaggttgcagtgagctgaggtcatgccactgcactccagcctgggcaacagagactctgtcttaaaaaaaaaaatccaagtatccaaataaagtagagttctgtgctaccacatccatgaactgaaaataaaaagcaggacagagaggagaaactcaatgacctacccatgctgactgtctggtcaacctgaaaatgaaaagcagtcagttgtatacactgctcttccttctcatgtatcttttacctctgtttgcactgtcagtcaacaaaccaggttgatttctataaattgttggagtctaagctcataaagactattataatgtgagtaatgggcacatccaatggtgtttctgggcagctatggaattccttgaaggagttagaaagaataaggttgaagaaagagtggctttaaccacccatgaagaaataattgctctgaaatgcttcactgggaattccttatttttattatagaaacagattcatatacacacaaaaaagtcctccaatcccagaaacagaatggggtattactgaccctgacaggacaacccagatggccgattaggaatcagtgctattaatttgttaaactcaatgtgaaagtcaacgctgtcccatccactgtctgaatgactttctattcaagaagaaatattctagacgtaagaaacatgccaagaaggaacatgatgaccttagagggacggggtcctgggacagtcagcaagtacgtggggatgaattttgagcacaagagatggagagaaagcaaaaacaatctggaacatttccatggaaggagatccagttgggatttagatgaggagaggtaggtgaggatggcaaatctctaaaatggtcccatacacatgaacataaatgattcacttttgaaaaggtattattaatgacagcgagactcttctatagctatgaaaatatcagagtatatcaatacacagtcgtccctcagtatctatgcggaattggttccacgaccccccacagatgccaaaatccacagatgctcaagtccctgataaaaaatggcatagtgtttgcatataacttacacacatactcccatatactttaaataatctctagattacttataaaacttaatacaatgtaaatgctatgtaaatagtcattttactatattggtttctaaaatttgtaatttttagattgttgtactgttacttttaacgtgtttttaaaaattattttctatctgcagttggttgaatccatggatgtgcaaccagtgaatatagagggcggactgtattttgaagtttaggtgagaatgtataaactcaaaaattactgagttaattttaattttttttattttattgtggtaaggacacttaacgagatttacccttttaacaaacttaagtatacaatactatatggttaactatacacacacaatgttgtactgcagatctttagaacttgttcaccttggagggggaagtggggagctgctaatcaacaggcataaggtttcagttatacaagatgaattttcattttttaaagtagtgtttctcattaacaatgtttctttcctatcatcatgaccaggagatggtggtgtttctgcagaaaatgtgggccaaaacataaacaacttgagactaatttgtgagaatctatatttggatttgctgttattttcttcagttttctttgattttgaaaactttgaaaaactggtcaatttttatgatgtttaaaatcaatgaagtatctcacataccacttccctgaagatcccggattctagctgagatgggatctgaggtgcaattttgctgctctttcggaaagagaaatcaagtgtcttaggtaaaatggcacttatcttgaacactgactaatatacttttaaacaattgcttccagtttcatttaccttgaaggagttagcagaaatatcaaaatttcataaaaagtgacttccattttctccctgggctcatttgagatatgttggatgaacgggcttgggttgagcaaattgtaagttccaccatttctcctgcctccctactgcatctgtacttggaatgctgtcaagagctttttgtgactgtggctctttttgtattaaataaaccagtcagcatgatatatgattaatattatgttatgccaggggaaacaggaagacacaaagcaataacagtgcaagaatatatttctgaatgcttatttttgaaccagattaagtcctgaaggtggtcaaagaagatcaatgagaactagagtgattgggcaaaactattagaagaggtgcaacttcaactggacccttgaaagatgagtaggatgcgaataggtagaagaggagcgggggctattccaagcttgtgaaaaataacagtttaagtgaagcacataacaggagggaaggtaggaagaaacatagcatgtaacagaacaaagagatcagccagccagcctaaaggagatgtgtgtgttggtgtcagagaaatgaggctggaaagtaggttaaggaaggatcagactgtttcacagagggtctttaaaaacaagctgaaaaattcagattggataatatggtaagaaatggtagcatgatcaagtagtttctcaaaaagaaaattcctaggctgggctcatgtctgtaatcccagcactttgggaggccgaggcaggagaatcatttgtgaccaggagtttgagaccaacctgggcaacatagcgagaccatgtctctaaaaaaaaaaaaaaattggttgggcacggtggtgcacgcctgtagtcccagctactcaggaggctgagacagaagggtagcttgtagtttgaggctgcagtgagctataattgtgccagtgcactacagcctggatgacagagtgagaccctgtctctgaaaaacaggaaacagccaaaagaaagaagagtaaaagaaaattcctagattagggtattatgtagcatgtataatgtagaaagaacattatagacccctacagcctggggagggactggattcatggtgggatcagaagttggggatcccaggagtgtatgactgccaccagttatctccctaatttttgagccaatctttcctcaccctggagtgcagagaacaaggagggatgtggtgcgagttgaggctggagagacagtctcagaagtcttccttcacctccctgactaggtcaacccctctcaattattggcttttataacaactttcctttgtggcatgtggcacagttgcaattttataattacttatatcatgacgtggtgtctatcttccctactaaaactccatgaaggcaggttccatgtccatttttgttcaccattgtatctctagcactggtgcagtgccaggctcttagtgattgcttaacaatgtttgctgaatgaaagaaagtagacatttacactcaagacactttaagcctagagtgagagaagggtaagttaaggccttgatgggaaaacatgggcagtgtggtaagatactctcttaggagtatctgcacacaacaatgtgccatgcatgtcccgtcttcccctttactcccctgtactaggagatatccttgtcatactcctatgaatgggtcccaacaggtagtatagaagttaagagcttgaaactctgaagccagactgaccaggttaaaattctagctctgccacttactaccatttgtccttggacaaatcactcaacttttctgccttagcttccgcatctgtagaatggggatataaatagttgctactatttttgccaggatcaaatgagctattccacacataagtgcttagaacattgtctggcacattgtacgtgctacatttagacaccatttactaaatgcatacttggctttcaatacagttaatacctaccccaaatacctttcccttgtctagagtccaagtacatagccttccctgttgttttggcaagatgagcaggggacaggaagtggaaatgatcaatggtggagggaagctgggtgtgggtttgggtttgaagcctgccttcccagaatgtggcagtagtataatctctgaagagatttaaaaaaaaaaaaacttttattttaggtttgaggatacctatgaaagtctgttacataggtaaactcctgtcatgagggtttgttgtacagattctttcctgcttctctccctcctctcaccctccatcctcaagaagaccccagtgtctgttacttccttctttgtgttcgtaagttctcatcatttagctcccacttataagtgagaacatgcagtatttggggaaaaaaaaagacacatgcacgcaaatgttcattgcagcagtattcacaattctgaagacacagaatcaacctaaatgcccatcaatgacagactggataaagaaaatgtggtatatatacaccatggaatactatgcagccataaaaatgaatgagagcatgtcttttgcaggaagatagatggagttggaggctatcatccttagcaaactaacacaggatctgaagagattttttcttctgataaaatttcccttaaggttccagtggctgtttgcactatgcttccagtcctaatgaggtttgctgaagtgctagcaatgacacacattctgccaacgctctccttgactgtcccagcctcaaagacacgtctagccaatgaaggctaggtctgagattcaatccgcgtctaggattgctgtctgacccaggaagaaagacacacattagtgtttggggacagtgcagagaggctatttcaatgccctttatatgaaggtttgcaagttcagcagtcaaaagattatttcttcttcagtatttggcctgcagtcagggtggccagcataggggagaggtttctgggttccctgctgtatgagtaatacgcttatataagatacagtattgtaaaaacgtcatttccatgggaaaaaataactaggtgcttcaaaagttagaacttcaaaggagtttcaaccacattatatacagctgaaagatgcaaagaaactggaggcaatgaaagaacaacaatttttacaaaagtgtaggatttagtctttataaaggaagatgaaagaaaattgtgcatttaggctggatgagaggttgcaaagaaagaacttaatgaattatcaagtatataaagggacaatacatggccagtaataactagcttttatctgttgcttctgaggacataaaaaagaaaagaaatttaaattgtaacgatagaacagtacataaaatagctagttccaggatctgttaccacaagaagaactagaactaaagttctgtctatggagattacattttaaaaaggcaaaactatcaaagatagaggagaaggtgcaatgatacttaactcgggggtaataaatatagtaattactatataaaatatagtaattgttacttataaaccaataactctgtattaggccatctcctagcactctacgccatctcagttaatctacacaacccatttcatacgtagtaagcataatctccatttttacacctgagaaaaccaaggttttgagtggttaaatagtttgtccaagataacagcactcgtaggtggtagccctgcaatgtcaaatctatgaccttctggcttcagagcctctgtcctttgcattataccgtattgcccctaggttgcagtgacatgtcttttcactgttgcctttcctttctattatcaattgttttccagtttagatttcacatatccttttccccaaagggaataatatcagcctaacagctggattatagtgaccaactggttatattagcaaccacatgtacacctctgctcagtatggactttcttttgagccacactgaaattaagttggggccaagacaagaaaggaggtgaggaacaaaatatccatctttcttgactgaaatgtaacagctacactgtagtacagacatatacacacacacattgtgagaaacatgtatggaaagatccagggccttaccaaagcataaatcaaattaggctgtaactaaatccatattgacttatgagggctgatgcaaatagcatattaaaagggatgagcatacactggtagtccaaacaagctcagtccttccaaaaagcaatgttaactgtagtttcctaaagtggtataggggaagaaaacaacttggagatcaggaatgagaccaagtaatttcctattgacgaggaatcaatgtatagtcaacaccatctaccacagtcaatcagtaattcagggggaaaaatgcacaacaaccatattcttttttggtagcacctaattcaaatcctgactaaatttctagtaatcattccaatctagtgtgcattcatttaaagagcacctactctgcctggcacagtgggagaaataaagataaatgaaaaagagtatctgtcttgaagagcttatgcattaatagggatgataatacatgggcacaaataataaaaaacagaagttgacaaggtgataaatgctccagaagaagcacaggttaagtgctgaggagtcctagagtagagacaggtttacttctagtttgcaggatttaaaaacatttcatggaagaagtggcaattaggctggattttgaaggataagcaggatttatgggtggagaaattagggatggaagtgggaaggcagaaaagaaaggccttccaactactacttatcaaaatgcgacctgaggacggcctgcaatagaatctgaggaagctgcatttgtgctaggtcttgaaggactagcaggacttccacaggcagggatggagaaaaagaattttccagaaagaggaaacattttctccatccaacctgtacatgtgcagttgttacttagacagcccttttgtctccttttcatcccagttccttatcatgaaatggccaccactcattcatctcaaattggttgccatatggtcggacttagatgctttaaccaatcaggaactgaaattggttgcttttccactggttcactcaggtttcagaattttaatgtgctcaatttaagtgcactaaactcagattttttaaaacaaatccttggttccaggttatctacatggtctcaggaatggtttctcaaagtgacagtccacagaccaccattctgcatcagaatgaacgatggggtctgcttaaatgcagattcctgggtcccactccaaggccactaaatcagaatctctgcaggtgtgatccaggaatctgaacttcaacaagttctctgagcaattctgaagcacactaaagtgtgagaaacactgacaggaagaggactgagcaaaggtaaaaaggtaagagagcacaggaacaatgcagtgggccctgaggtgcatgaatggaagaatattgacctataaaggtaacttgaggttagaccatgaaaggccttcactatcagagtcgggggttgacatgtatttgagtggcgacagggagtcatccctttcagtggcagaacactgtggttagagcctgaaatatggagccaggctgccaggattcaaatcttagctcctcaactcactagctacctgaccttggataagattcttaaccgctctctgcctcagtttcctcatccataaaacagggagaacaatagtactcctcacatagggttgtcatgagattaagtgagttcatatctgtaaaatgcttagttagaactgggactgacatatagtaagtccaaatacatgttggcataaaaatttttgaacaggggtgtaacacggtgatggattgctttttggaagattaaaatggcagtaatgtatagaagtcacctacacatcccccaccagcaaatcctataatttttttcctctaactcagtggttcacaaccttagctgcatattggaatcacatcctcctccttctgatctggtataaatctaccaaggtaattccaatatgcacccatagttgagaaccacggctccaaatgtatttcaaatttgtccacttttaattattgggtcctcagtatatacaagacactgtgccaggtccttctcttatattatctcattgaaatctcacaaacatcttgaaggtaggagctaacattatcctcactttaaagattggtagaaaggttgaataaggtcattcaactacaaagtagcaaggctgggattagaaccaaggcagtttggctccaaaggctccactctgaaccactactgtgttctcagtccaagcaccctttttctcacactggaaagagtactaccctaaccatcttgctagtctctccacttgcattattgcctccctccagtctagtctggaaataatagccagtgagatcttttaatatgttaattggatcacttcatactctttctcacaaccttccaatagcttcccaatgtattaaaaatggaaatccaaaatccttcccatggccttcagaatcctgcatggtctaattcctagttacctcttcagcctcatcccatgtcagtttcaaccacaatcactacatttcagctacactggtccttaggctctttgaatgctttaagctcttccctgcctggggcctttgaactttcttttctctctacttagaatgttcttctttgggatctttgcatgggtgacttctttttatctttcaggtctcagcttaaatgtcaccttctcagagaggccttcctgacaactcaacctaaataaactacttatttttaatctcagtcctatgtttattttctgcatagtacttgcattatctgtatttccacgtttgcttattatttgtcttttctggtgagttccataagagcaaagaacatatcttggctgctatgtatgctatatatattgttgtgtaggttgtgtgctgcaaaaggatgccacagctacaaaggtgctttccctgggattttctgaaaaatggcaataaagtatcttatgtaagggaatcctttttgtaactcacataaagatgccatatggtctagcaccaccctatatatctactgtatttatcaatataaataccccaattctagcacaatgctgagcatacagtagatggtcaaaaaatatgttgactggatagaaggaaaaaggacaaaataaggatattgccagtgggaaagtgggaaaagggagagatacagataactgctgaaagatttggtaatctgagaagaggtaacaaaggagaaattaaaggggattacacttgatcccaggaacctagcgaaaaaactggtgccattataaaaaaaataaaacctaaagaaaaaaagactaatgtgagaagacaattcaattttgaatataatttgagaaaatgctttctgttttgcttttattgagtttgtcaccatcttattatggggtttaaaaagtatacctaaatttgccctgcacagtcttcaaaatggccacatcaattccttgcaaggtccattcttccttctaaggctatgaatgaaaatagtctgtgttttatgatacaataatttaagggccaagctagaagggattaaggatggagaaataaatatattcactttcacatttgatgactctttcccatcctcccctgaagcacagcactccatcctgtagttttttttttttttttaaaggctgtggcctttaaaatcaatgctttatttatttttccctttgttaattaaaccacctttaaaaactaaggctaccataaaaattacctttccctaggacattagacaggtattttcctcctttctaaattctactacacaggatagcagcacccaggggtcttgggatataacacacctacctctgcatacccggcagcaggaatctggaacagagactgggaaggcacaggttaatttggggcaagtcttgagaccacaatacacgtttccctcctgccaaggagaaacagaattaagattagaagcatctaggataagtgtaaaggcttcacttaatacctgaaatagagcagggactcaaaacacggcatgtccttccccccagctctcccatcgtcagttctcggtacttcctacattttattacgcattattttttttctcctacaattcctccatgccagagactaagccacagaaaagttagcaatcctagtcgagcatcatggtctaaggtggtacaaagtagtctgtcagggatgccatgagcctctgaaccatgaattatagtcttgtttctttcttctctgttcatggtacccttggtcccccagctggattgggggtttaaaggaatgaagatttatttcatagcttccatttgtaatattcactagactctcccttccaaaccaaaggaacaagctctctggggtaatacaaaactatacaagatgatctgatggccacagctcagtctagcacaaggcaagggagaggataaaatttacttgctggttacatctgtctttgcaataatcctgatttcctaaatttctatctttcaaatgttattccttaaaccttgttcttagttcttagaagcacattcttttggggctagaatgattcctggaaggccattaagaaagcaaggccacacgaaaattctcctaaactactgagatactatattcttactaaaagtcctaaagggaagagattctatagcttcccttgacaatccagtgcttaatgccacttgcaggcagaaaagttgttactacatctaacttcattccttcctgcttcagtttaaacactcattttactccattttctagttctattgattatattctccggactgcatattagataagatgtaattagtatacgttgtttgtaaagtaaatgcagttcttctgacaagtaatgtcctggtagtcatcatgaccaagcatttatagagagttttctcattgcagggcactaggaattaactggttagtaaaatacttcagatatgggaactaacagacaactcattttcttgttaattggagtgagtggccctagatagtcaaagtgacttttccacccatagcattcccaaagcttcaaataattgtgagtccttcagatggaggctttggtggtataattattatgaaaaggagcgccgatcaacacaaacagctcacctttgcccatttaagcagtcctacagctttaagactgggatatgattgggcctgagcccttcaacagagttgttcagggtgggtgaagatcagggagtttggattgtcaaggaggcttatgatttaatgcaagtcatgttttattcaaacaccttacagtgcaggcacaaatgaaagtacaagtacagaggaagctcttgtatttgagtagggcctagcaggaatgttaagatgtagggtcttaccgaacagctgcactgggtgcattgattgggttgccgattctgaaagagcccttcagctacgaacagctctccatgttggtaagttgtcccattgtactcgcaagacttgctggtcaccttattgttcactgggggtaaggagtcttctagaacagggtggagaaaaaccacactgagtattggcatcattgacaagaatttcataaatcccaacagcagacggggctgtactacatagagggagttttaagacagtccccgctccagtgaccaatgattttgaataatgttaaaacagccagacaagtacagcagctgacattatgatctatccatccatccatccatccatccgtccatccatccatccatccattcttttatttgttgaccatttactgagcacctactatgtgccaggaattgtaatatgtgttagagagggatcagagaacatggacaaggtccctgcctagatggagctaatattcctagatgaataagatattatctttcctgaaaggaaggagtccatgctatctcatttaatcttttcccccagttgcttcagaaggggacccatctattatactgccctggtaactttattccctcccacatttatttatttagagactgagtctcactctgttgcccaggctggagtgcatggtgcgagctctgctcactgcaacctctgcctcctgggttcaagcaattctcgtgcctcagcctcccaagtagctgggactacaggcgcctgccaccacgcctggctattttttttttttaagtagagatggggtttcaccatgttgaccaggctgctctcaaactcctgacctcaattgatccgcctgccccatcttcccaaagtgctgggattacaggcgtgagccatggcgcccggccaccgcctacattttaaatcacttttgtgcttatctgtttgttccagcctctgtggttttgcttttttttaatccctccaccgagactgcccactccctgactcttttccacccattgaggtcctatctgatcttgaaggttcagcttatgccgcctttcctccacgaagcattctctaaataactccagccacaatctggatctctcaaggcatctaatgtctgaagcacacaatatgacatttgaatattattgaaactcatatttgtgaattatagtaacccagcagaccatttacaaagagatttcacatatattattacaatggagcttcataacaaccctgtgaatcaagtagggtaaattcttaccttcattttcatttgagggaaataggattgctgaggttatgtgaattatttgaagtcacaaagctagtgagtggtgaaaaaaggaattgaaaccaacaaaagatacaaccagagcttggaaagtgcctgccataagacagtggaaggagagaaatcaggggagctgtgtgtttcattagggagaggcttagagagttgaaccatcctttcttttccatcagtcaaaactgtaatgaatatgagtctattttgtggtgggtaagttatacctcaatacaactgtttaaaaaaaaacagaatgggccaggcgcggtggctcatgcctgtaatcccagcactttgggaggccgaggcgggcggatcacgaggtcaggagattgagaccatcctggctaacacagtgaaaccccgtctctactaaaaaatacaaaaaattagccaggcatggtggcgagtgcctgcagtcccagctaatcgggaggctgaggcaggagaatggcgtgaactcgggagacagagcttgcagtgagccgtgatcacgccactgcactccagcctgggcgacagagcgagactccatctcaaaaaacaaacaaacagacaaacaaacaaacaagcaaaaagaatgaaattattctcagtatgtagtgaaaatgataaggctaacaataataacatccataataataataataatacacgaatagataccatttatcaagccctagctatgtgccaggcaggaatgagtgcttttacatacataatctcattggctcttactaataatgttctgatgtagacatgattatgcccattttgcagatgaagaaactaaggcttaagagattgacttgcccaaggtgacacaacttgcaagtggcagcactaagatataacttgatgtctgactgattctagaaccttccctcataaccactatcaaaaaaagtgccaatcacttcaaacctataataaggaagggaccatttaattaaaaaccaaaacccaaaccactagaacatgaaggctatgctgtccctaatgttgtggcctaaaatacccagaaaacagacaatgcacttcttttggcttcagcgatttgggtaactaactcaattctatactttgctatataagtcgatctaacatcaatttctgagtaattcactctcagggtgttaactacttattaatgaccctttagaggatataaagaaagttccttacttttgccttataaagacagccttagctcctagaaagagtttaactcatactaattaactctgtctgggctaagaggccctgcccctgcccacaagcgtatacaatcagacagctgcagctggcagacatgagtgaaacccatcagagaaaggacagaagcaggcccatttgccccctgggctctaattattccaaatctcagcattttgtggtgaaggaaatctacagtgacctacaaaataatatttgtcacggctcttatgggagctggcagatgtttggaataccaaacaaacaacaacaacaaaaaagaagtttggaattattttgcctcaaaagaatgtggcttgatttttgaaccgggccttctaccaaggaatcaatggcaaggcaactgcagggtgagattttccagtggaagaatgatcttgagaatcttccttgcaatagtcttctgagtaacctggcactggagtctattattctactcaacaggagatagggagaaagagaaagagaggaagacacagtagaatcaaagaaaaagaaaccaattatggtcatgcttaaggctagttttatgcaataaaattcttaacatctcattcttatttcattcttgcaacacccttaatggtgtgtatctcgggggtggggggcgaattactgaaaatgaggctactagtactccaaaagatttgtcccatgtcacacagctgtttaacaagagagccaactcagaaatatagctttcctgctttcaaatttgtgctcttcacagaatgggtgttaaagcttcagagcaggatcactgagtcacaatcccaactcaatggtactgactccccacaatcttgtacaaggcactttacctctttaagcttcaatatttctaggaatgcgatatggactcaaatctccccttgcatctttagagggccaacacagcatgcttcctaactgcagaaggaagaaaaaccacctcatattttaccttctcctctcccagattttccaaggtggctgggctagtaaacaaatatccttggaacacattcagtgttcctgactgaaaactagcagaaaatcagttcaaagcaaagctggctacagggcccctcagggaatgctacaataggaatgaccaggctgcgtggcttctaacctcccccatctcttctgtttccagtcaaattcccacctagcactaagaggaggactggagaaaaaaccattgtagggtgagcagacaagcactaagtcatgtgaccacagatgtgttgggaaagaggaggtttcttctccccaagtgagggatgatctcatatgtaagcagaactatgatttccgggatgctcagaaaatacccccttatcccaaatgtctcttaccaccttttctcacactgatgcttaaaatgccactattggaagtccattcctctaggttaaatggctaccttttgcaatcagattttgtaatcccaagaattatatgagagggtacacttacaccttgtcactaactaacacctcagtctgaataactgccacaggcctttttttttttgtccttcagagcaactggcaaattttaccaagaagcctgtggttccacttcacttctttttgtacgccttccctcctctcctggtgttacccttcttcccacactctggaaccaagtcctcatgctgactgctctcttccccactctccccaccctataaaatgatcatttccatagtaggacagttcttggatagtcagaaaagcagcttgtatgtcaggagacaaatctgctcccagtgttataaatacaaacctccccagagctttcagagatcagttgctaatctccttgacgccaagccatcttttcttttgccattgctgccattactttggttcctacttttcttctgatggctgagcctgatgctagcatttctttggttctctgtcattctactgatagagtcctagaacatttgcaggctattgggaggtggctggagaagggacatggaaatgaaggtaaagactagaaagaagaggttatagtccctttaattgcccatgacacacagagagacatacacatccaacaaagtaaaactacatcatctaaagggctttaccccaagtctcagaaatatatgggaagagagaatgacaaaaaggccttgaaagaaacccctagaataggatgctgtttctatgtgcgtatctcacagtgatgcaagagaagataactgagcctggtctctggggtctgcaaacattggtctctggggtcccagctgctatgatctgaatatttgtgtgcctctgaaattcatatgttgaaatcgtaacccccaaggtgatggcttttaggagatggggcctttgggaggtgattaagttataagggcaacatcctcatgaatgagattagtgcttttaatagaagaggcctgtgggagcttgttcgccccttctactatataggctcacagggagaaggtatcatcactgaaccagaagccaagccctcaccagagaacaaatctgatggtaccttgatcttggatttccaccttccagaactgtgagaaataaatttctgttgtttataagctactcagtttgtggtgttttgttataccagttcaaacagactaagacaccagctttggcatgtcttggttctgtgatcttaggaaggcttgagtatgccttctactttacgtggctgtgaggttcagcgataattaattttaaaaagcccaaaggtatctggtacataacattcacaataaatggtagatgatcttgctctagaaagaggtcacagagaggaaagcagtaaagttgaagaatatgaaggaattttcccaatttccatagatgataactaactgaaaggcatttgctttgcactgatgtgtatggtaggtgctatggagacatgagtcaaaacactatttctctcttgttttcttattcattcaacaagcacttgtggaggtctttgactatacctggcactaatagatccttgactatacattgacaatacctggcattatgttaccttaaagctacaaagataaataggacattcccctgacttcaagtaaaatcctgctttcattggaggggaaggcacaaaaaggtgttaaatgataatgtatttaaataacacataaaggttcataatggaagagaggtcaaataatcacaaattgccaatgttaagtggggaggagtatcaactgcatcaataaggattcaggttagatactaaaaaagattccttgctgaaagagttattagaaactggaaccacaggccaactaggcatgtagggaaattattttcaaactaggttctgtgctgctttaggattcttcagaggtacttgagggatgtgaaaaaaaaaatcccttccccatttctacttcaacagaatacctcttactttgttagtgaaatgtgtttttattagcttttttaaatttcatttgaagaaagagtttgctgccataagacactgtaaaacactggaatagaatctcttcacatatttgctgtttggggattaaaatcctatttgtccctaatatataaagagcttctataaattgacaagaaacagattcataacccaatggtaaaaatggaaaaaggatataaatagacagttgacagaaatggaactacaagtggcccttagacatgaaaaaatcaacctcattcattagagaaatataaattaaaactgcaatgaaataccatttttcttagcagatttagaaaaatccaaaagtttgaataaaacactctcttggtaagtctgtgaagacttgattaaaacatgatgaagggcaatttagcaatatctgttcatttaaaaatacatatatatttgacccaacaatcctatttttaagaattcattctacagatatacttgcacatgtgtgaaacatataaaaattattcattgcagcattgtttgtaatggctgaatatggaaacaacttctatgtccattgatagaaatctggttaaataaatgatggctcattattataacaaaatattatgtagttctataaaagaataagttctctgtgcactaatacagaaagatatattattaaatgatgaaaacaaggggtaaaatgatgtgcacaatagactaccttttatgtaaatgaaaaaatatttttaaaatatatatatatattcatatttgcttacattttcataaaaatctggaaagatatataaccactaaaagttatgggggggaactacatgttgtagggagaagataagaattgggtgagtgtgggacggggtgaataagatattctattgcattcttttatatgtatacctagatatataatcatatatacatgtacatatacatatgcattcatattcttgaatgatataaatgtattcctcattaaatttgaagactacgtttgaaaaaacttctacttgaaggccgtagactagactaggtgaacattttgggtccattccaaccatagaaaatcaatcctacaaagctggtcatcagaagcccggctgtattcctactagtgggagagatcctagctatgactttgtgttcccagtcttattccaataatgggttctctccaccgacatcattgagcccgtccatctgggcaaagtggaggttgttacattgctttcttaaacaatgttaaagtaattgtgtaaatctgagctggcttttagtccttggcccaaatggaaggaacatagacaaataaggttgctagtgggaaatcacccatggccttctaccagagcactgctgtaatggagggaggagcagctgggagctagctgcatctcagtcaggcaaagtaagagcatacatccaggatgcaacacatcttgcaggatgaatgtatcaaaaacagtgggctgggcacagtggctcacacctctaatcccagcactttgggaggcgacggcagtggatcacctgaggtcaggagtccaagtccagcctagtcaacatggtgaaaccccgtttctacaaaaaattagccaggcgtggtggcgggagcctgttatcccagctactctggaggctgaggcaggagaatcgcttgaacctgggaggtggaagttgcagtgagctgagcttgcgccactgcactccagcctgggcaacaagagcaaatctctatctcaaaacaaaaacaaaaacaaagaagagtgggtgtctgcagcctccccccacctccaaaaagtaacaatgctcatattctgaggctatgtggattcagacgacattttccttgggatgctccctgagatcagaggtactgcttcaaatgggcccatcagttgaatcaatgatgcctacctttagatttctttttttttttcagcacttcaactgccatcacttctttttcccctgggcctcttgatgtgatgacttaactagatctgctttcctcgggtagagtccaacgatttctagattttccccaaactctcctcccccataagaacttaactctcctgtggcccatcacattgaggtcatgctggcaggccttaatactaatcccgttaagtaattcatactgaaatgaaaatggtagataatgttttaaaacagggtccttttctagataattatattgtaacataggcctttgatgttttattcataatgaggctgtagagcaccgggtaaagagtgtgaaactttctagaacttaagacctgaatgagggaacttgctaaaaatgcagcttccaagacctgtcctagggagaggagaagccttacttcagagtgtcccatttggattcaaattaaagctccattgctaattattgcttattagctgagcaaattcttagcatctctgagtctcagtttctccatctataaaattgggatgataatggtacctaccccataggttgttgggatgatcaaacaaggtaagacataatctgttcagcatagtaccaggaacatattaatgcccaataaatgcaattgttgttcttttactactagctataaatgatagggtttctggagggcagaaagcaggctggtagggaaagagatgtggggctacttaacccttacagtggccatcctcttaccacactggcagaccctgcctctgtataaggcttatgctgaactccaaagtagcagtgacatttacttttcaatcagtattatatactgtaaattttagaaattctcaacacctgtaatgtaatgacaaggtttgtttttacccctgtgcagtctttcacagccctgtagaacttctcaaaaactgtcagatcccaagtggtaactagagattcacttctgagccatcacatccactaagaatccttttatgccccagctcctgggcaaacactatctgccccattttcccatctcagtgggaagaccgtcaggtgtgatttagccaagcagttgctttctagccagagccatttaccaagcacatagactctactttggacttattgagcaccccagacaggtggatttacgctcagaagggtcacaaatgtatttgtgattatgagtagtcctaaagggcatggaatagagagaaaaagtgaactccttggccaacactcccattgtattttattttattattattatttttagagttggggtctcactctgttgcccaggctggagtgcagtggtgtgatcatggctcactgcagcctcaaagtcctgggatcaactgatcttcttgcctcagcctcctgaggtgctaggattacaggcttgaactgccatggctcccaccgtattttaaccatcatttccagtgtcctctcctgcaacatgttttccagaattgctaaacaaaagtaattgttgattggtttgactttcatctttgttttaggtcactactgaaggtgcttttcagaaaggatttaatattttttagtttaggaagcctctccatttcccccttcatacatcctttggcctcccacccttcgttgcccagctcttgtcttgccttttcaagaaaacttcacttgattacttctgcacttgatggtctctttgtgggaagggaaagcaatcaatagagcagattgcttctgcgatggtagagcttccaaaggtggcaagttcaccatgtccctaaactctcttcctctccaccctgccagaatgcctgatatgcccccagattcaatcattagttagagaagggccctatctttcccagaggtttaatatcttcacagtgatgaatacacaagactggaactattccccagtaaagagaaaggcgctattggggggaatcctacaatgagataccatttcacatccactaggatggctataataaaaaagacaataataacaagggttagcaagtaggtggagaaattggaacccttatacagtgctggtgagaatgtaaaaaaaaataataatagtacagctgctttggaagataatctagcagtctctcaaaaagttgagcatagagttaccaatataagccaccaattccactcccaggtatatacacaaaaaaattgaaagaaggaactgaaacagatatgtgtatatgaaagtttatagcagcattattcataatagttaaaagatggaaacaatgcaaatgtccatcagtagatgaatggatgaacaaaatatggtatatccataaaatgtaatattattgctataatggatgaaacttgaaaaattctgctaagtgaaaaaaaaggccagtgacaaaacaccacatactgtataattccatttacattaaatgtccaaaataggcaaatccatagagagagaaagaagaacactggatgccaggagctgggggaaggggagaatgggagtgactactagtaggtatgggattcttttagagatgacgaaaatattctggagttagatagtggtgatggatgcaacatcttgtaaatatactaaaaccaactttacaacataaaagggtgaattttacagtatgtaaacctcagtatgaggtatgtatacctcaataaagcgttaccaaaaaaaaaaaataacctccaaacgttatacaatacaaacacaaagactgggtatcagagcggagcgggcctgaaaaaaatgaaggtgttttgtaggtgataggcagttgaagaagagaaaggtaaattaaaaagaaagggagaatcacaaatgggtagagggagtcaatctcaagtcataattttgcctagtgtccccagccgtggtgtatccactttgggagatggagtgggtcagccagacagctcagctaaaggagggggtgatggggggaagattttcctgcttgaaagcttccaggagactctgtgggaccacaccttcaacaagactagtggcctccctacttctacccttggcccaacccccagtgaggtcccaggccaggaaattcttgtagcagattcaacagatcactctgcagctaaacagacagacacaacactctgtcccaaccaagaaggtgccgagtgagaggaaacagtcatctgctgctccagctggcgagaagagagtggaagagggcgctgaaagctcacatcctagtctaatcccagctctccccctcctcatccggaccccatctgcaggctgtttttcatcccacttccgtcagtgtttcagctgctgtcagtcagtagctgaccctgcctgaatatgccgtcttgtcagacagatggctaggaaggatggcttgaggagagagtgtgcaagaaagggccatgtctctgtgaagcaaagagtgcttgcaaatggcatagatttgggggttttttggggggcagggggagggcccatgtattcttagctaagttgtactatttgtttgctgtgtgatggaactgctatcactttgcatctctaggcttcagtttctaaagaactttctgtgtggatatgtgtatgtgtgtgtcagaggtaatcatttcacctgcttctctttcacagggatatattataaagaacaaaaatgattatgtttttcaaaaagattcagggagtaaagaagcaacatacaacaaagtcaactgattatgattatctccctgcttaccaaatgcattctacctgaaggcaaaaagagatgtataattttgtctgctttgatggtccagtgtccagagttactacatcccatagaagttagaaaagtcccttcagcttgtgatgtgctgccttataggtagcaactctagtcttgcagtgtcagtcaactgcttgtgagtaagcacaccccaaagactggagttccatgtacggacccacaccacagcatggcccagccagggtcatgaagttcatgtcaaagatgtatcccctgaggatgtgccacttggctaaagaatgctctacctctgattggccaattctgccctgactcatgctagccccaactgcccccacagactactctttgcttactcatatccagcccccagggcccatcaaacacactctgattttctgcagcaactctcatggtctgcctgtttgcatcctaccatctagcacctaatataaagtgtgccgctttttaagtgatcaataagtgcaaaggagacagggtctatgccttctacttctctatctcctgctggctctagcattagaacacagcatgctggctgggcgcagtggctcatgactgtaatcccagcactttgggaggctgaggtgggtggatcacctgaggtcaggagttcgagaccagcctggccaacatggtgaaaccctgtctctactaaaaatataaaaattagcctggtgtagtggcaggtgcctgtaatcccagctagtcaggaggctaaggcaggatcattggttgagcccaggaggcggaggttgcattgagccgagattgcactgctgcagtgcacagcctgtgctgtagatcgcacagcctgggcaacaagagcaaaactctgtctcaaaaaaaaaaaaaaaaaaaaaaaaaaggaacagagcatggcaagaaggaacaaatattcaaatagtgatacatgctaattttaagagtctggtattaatttcattaacatataaatatgcatatctagaggcaaggtgattcttcatttaagggcagatagctggagagaaataagtatgattttcaaaagtgattcagaagtgagttacagaatcgatttcttctgggaaaagggtctgtgggttcaatcagattctcaggatttcatgacccaaaagaagtaccctctctattgccatacaaagcaggggggctgaggatttcacttcagcagtatgagatctctgcaaacaactctgtccagattctgtggctctaaggttatgcacacttgttttcagctttctgtgtgctgagagtacttacttgtggaagtttctcataatccagtcttcagaggcaacctctatgttctttcctgtcaaaatttcttcttccactttactgaacagctttatcatcagctccattattcagctcatggaccattccaatctcattacataagcctcctagggttctatctccaagaggaaactggaaatggccttctcttttgacaggtggaaatgaggcccagagatgccaaggggacactgctatttagtgccaaagcaaagattcaaatttaggtctcttcattttacctagagcagcaaaacgtgagggctagagaagcccactaaaatccagtctaataattgcggaagataaaacacaaatccctctgttttcagaggctaattcctcaacctcaaatcttcatgtgaacttggattatgtagcccaacaaaaagaatcccttccatggtgaatctgatagatttgtattattcctttgctactgtactatgggttttaaaaacctctaattaccaggaggtgtaatgttaaatcaatgattcttcacgatgcctcattgttaataacaggttatgtggtaatgttgtcactcactgccttcctcttctccctgaataaattaagaatgagttctactattacttggttagttctaatcctttgagaactagatttttttttgaaggtcaatgaccctttgaaatggacaaattagtcattaccctcaagcagcatttacagaaacaatgtgaggcatctggatgagacagtggggagttcagtcaagcattcctttgtattgcctacaccagcatttcccaagtctgctctgcagagcactactagtccacaagatgctctgtgaaaacaaaattctgtgcttaaataaagttgggaaaagatccacattcaacattcagtgtccctttcaatatgttaaaaggatctcacaagtcccatagtaaagaaacctgtttaatgataactcagcattttctctgactttacttatccaccagactctttttttcacctaggtaacaactatgaatgccccagaaacactccttggaaagcactgccctgcaccacatcaaaacctagatattttgaggatctggatattcgccatctcatggacactattatctgctgaatccagaaccgcactcccaacttcagtcacactcaaccttcagctaagacctaacacgttactcctagatggctgatagcatctccagtatcttttctttcattagcaagccctataaatcaagagaaaatgctcccctgtgaaatactgtatagtgctaataaccagaaccacttgcaacaacagcccaatgacatcaggcacctggagacacaaagaagtcaagtccagggggtggtatttttcctgtatatgatgagaagccagggaagttatttaagtagtgaaatgatttgatgagatttacatttttgaaaaactattctgagatgactggaaaagagataatgagctcggggacaggatatgtcaggaggtgactgaaagagcccattgctatcacattaggcataaaggaagaaaagaggcatttggtacttgaagattaattgagaaaagttatcccccaatgcacatattattttgtttggaaaactgttagcagctggcttcagaaagtggtccctggaggccactggcagagggtgcaaggaaagtggtggcacacaaggctccaggctgctggagcagtgggaacgctgttaggaaaatccagtctacctcttcctgacgaccaaggaggcagctcatctgccatgtcatggaactactagaggaaaagacaaagtatcattttgcttctcctaggaaattctttaagaacccagaccaaaattcctgatgtggggagagttatttagttaagactacacaatacacagaaaggaaagggaaggtgttaggaaatctggattctaaagaactccaccattgattgccatgggatggtgacaattccttaggaaagaaaggtgtgaaaagtaaaaatatgtcaaatattaataaaaatttccagtttgaaactgggcttcttttggcagccagatgctcatattaaagtgattagagtgaaaagtgatgataggggtcagagatcaaacaaataaataaggtatattatcatctttggacttaccaaggctggaaaaacaatatgagattcagtcattgcttagaccaataaccctcaaaagaggaacaaggagaccatggtgtctggtgggagtggtttcaaactccacataccacctcatccctgattgagaatcactgcacatgatgaaagatgtcactgataggagtacaatatatgcaaacaatttagaggcaaaaagagtctgaggatcccagttccaataatgacaataaccacaccaataagattaggaactaatatttactggctcatgcttacactgagctggttctgtgctcagggcttcaggttgatattcattagttcttttctccctatgtccaccctctaaggtgattattgctattatctacaattatagatgaggaaacaaaggctaggaagtggccaaccagaagtgatcccagaagtggagctatactacattgttctagagatggattttccattatctgaaactccagctaggataaaatagccacctatttctgacactgtaatggcttttccgaagttatccccactatttcctctggaaaggaaactactctctctcttacacacggacacacagaaggtccaaaaaatataaggtagctaatcaaaaggaagtacttgactagcttacctcatattagccttaaatggctgcagagaatgaaagagagagcagggagactatcactgtgggttgtaccttcttgagaggagaaggagggaatgtttaagaactgcagattacttcactacttactgggccaatggaataatcttggaaagaacaattccttctgcagaacctaaaaatagtgtctagttagccagctcctcttctccagagaccaccaaccctctactcaaagtgtggtatgggaaccagcagcattaataccacctgagagctagttagaaatgcagaatctcacacccacactccagacctactgaaacatcatctgcacttcaggaagattcccagtgattcagattctaagagttcatcttattcagaaccttcaataatgctgtagaaacaagtcagcttctcaaaggttaatgagtattgagaagcctttttactgcccgtactggacaaacatatgtcatatttgttccatatggcctgagtccacaccccagggaggtataaatgcaggcaatcttagaactgagctccctgacatccataacctttgtttccaactcccatctctgcaagaaatgtcaaatacagaacaggattctgggaaagtgagggtatctacccccaattaaaaaaaaatttacaactacagtagttctcaactggggccaacttttccccaggggacatttggcaatgtctggagacatttttggttgtcacgagttgagaagggtactctggcatctagtgggtagaggtcagagaagctgctaaacatcccacaatgcacaggatagacgatatgacaaagaattatctggccccaaagtgtttgcgaagctctggactagaaaaaataatagatacaaatcatctaatccctaaatgtttgaaatatagctagggagaaaaggaacataaaagtgctttctccattctggtgaacagctttagattagacagcaaagatctagctgtccttgaagaggtgatgcactcctttggctcacatcaaacttagagttgagcctttctttcagctgaagttcatctccaaaactacaccatataaaaccaactgctcaggaagtcacgatagacacagaaaaatctttttcacaaatgccagtcttcaaaccgagcctaaataaaacaagaagaagccatgccttatttttttctcctgttctcaacaaacaacatatatcatgaagtaattgaaaatagaaaacacctgaaccgagaagtagctataagaaataccacacctgtaatcccagcactttgggaggctgaggcgggtggatcacaaggtcaagagatcgagaccatcctggctaacacggtgaaaccccatctctcctaaaaatacaaaaaattagctcggcgtggtggcgggcgcctgtagtcccagctacgtgggaggctgaggcaggagaatggcgtgaacccgggaggtggagcttgtagtgagccgacactgcgccactacactccagcctgggtgacagagtgagactccttcaaaaaaaaaaaaaaacaatgaataggattaacataattattctatgtattctatgtgagtgtgttaaaggactctgaatgccctggtagccaggccaaaaatggaacaaagattagttatgtagttccaattttaatggtttccttttactttttaagaatggtttacgcccagtttaggattcagaatgaatttcctaggatcattgctcacgataccattgaatgtcatctatttcacgttcctgccccaggatacatatcccaaacctgtaccaatgagaatgcaagtgctcttacatatctgtccagaggccatgtgaattatgaagtaaaatgtaaggactggcaaaattgcatttatctaaggcctctgcagtcaggactagtcttctgttcaaccaaggccgacagtgctctgtaaggggaaaacatttcaatattgagagtatgttgatgaagacttcagttaagactcagtcagactgaacccttcctacaaaaaatcacccttgctcaagacaagtatgcagcggaatacacaatgttgtgtgctcattaaacccatctccatcctccactcctggcacccagctacactacattccatagtctcgcctgcagttaggtggagccatgtgaatgagttccagtcaattgaatgtgggaagaaatgataaacatgccttagaagactgacctataaaacgtcctgcaaaactctccttgctttcttttccctaaactaaggaccacataccagaggctccagtgatgaactgtgagactctagaggaaagaaagaccactagagtgaaaggggcctgggtccctgaatgactgcatggagcaaaagccctccctctccataggcccctccactcccacattcattgtctttagtcactaagatttggggattgttagagcaatgggcttatcccaactaattattttgtctttgcagatatattccttcttctaaaatcatgggccatatgtttcactttagcccataatactgcattaatatcacctatactttctacctttcacattccatattcctcttccctcttgataactgctctccatagcactaagggaaggcactgcctaaagtcaatatgcttagaacttcctctctgattcaaattctcattaaaagtaaactaaagtgaaatcaaaaccagagttatgggaggtccaatttttctcaggcttgctgcccaatggcaatcaacccttggatccaacggcatgtaagacctggctctgaggcctgacttcatgttcatgctggtctacacagcattttagggaataattactgtcccaatgctttagtccctaagttgtccctcccccatgtatcaatgtcaatgaccagcatgtctgaggaaggccaggtagggttggacaaaagatacaactaggccagataacctaaaggtaggcaaggaatgacatgaagaagaaactgaaaaggagttcttagagtgtgtgattgtcattagggctttccatcaatattcaaattctcctccttccaggcacatggtagtattgcatttccctgtcctgtagaagtcaagtcatggtagtgtgacttgctctggccaatgccagatgagcagaagtaatctgtatcactcctggccaaaagtcttaaacagccagaccacagtgtgttatattcccttcccatagtgctggaactaaattcccgatggtgcggcactgtcagccagagtctgttggtgataatgacaggcaccaacctaagacaaagaggtagtatgagtaagaaataaatctttgttgttttaagtcctgaactttgtaggttgctactgcatcatactttagccaattctgattactatggagtatgtaatatttgatgaggaatgggctttgatattcaaaatgggaaagatgaaaatattcctgcaatttctacctctcttccccaaaagaatggaggataagagtgattttttccccaatgtgatatgcttaagcactctagcagctgaaactaagtctcagctactaatttgacttagcctattgtgtctagaacaggggttataggccagatatgacctgcaacttgtttttgtaaataaagttttattggaacatattcatgcccatttatttacatactgcctatgactgctttcacattacaatgcaagagttgctacagcagagacttcaaggcctgctaatgctagcatatatactatttggccctttacagaaaaaaagaaatgctggcccctagtctagaagaagccaaaggaaaacagatccatggagggtctggaaaagaaatccaatgtgcactgccactccaggtaaagagtacatactcttgatagctatgtaaccaaaagcatacacaaatcaaaagttggtaccagcaggatttctcttagtgcttcaggccctgttagagtcagtagggcaaagggaaccctaatacaaatgacttctaatgagcacatccttaaagttctgttgtttataacccctctcctccaatatcaggatgggtataggatctgaacaaagggtatacacagtatatatcaggattagcaaacctgacagtcctcagaatgactcagtggaaagttgcttaagtgcttgctcaaaatgattcactgcctggagagtccatggcaagtcagattcttaggctaaagtgggaggtacagtttgtccacctccctgaactcagcacagtgcaagcaggcaggccctaagtaaggaagtaggctcttggagggtctgatgagggtctcagcctgctgggtaaggcctctgctgtggccactggctgccctctgggggtgggggtgtatatggtgtggccggaattctaggaatcctgtgctgtcctagcaggcactccaattggcttggtgttctacatgctccaaagactttctccagtgtccttggcatctgatgactacacttgggcttaagatttttagggctgggagggtccctggaagccttctatcttagtaccagatcactccttcatttggtggcaccagcaaaccatctggccattctactgcagataggccacaggctatttacccccttgcctctgcctggcttttgaagggctgcctggaggagctatctgcttggccgaaactcagcctttggtgactgttaacaggttttgcttcaattcagctattgctgtgttaccataggttggctctgggttgagggcaaaggcctggggtggaaaacagagaaaggagaagagagatgaaaggatactttacttggacctacaagttgaattattctttcttttagcaggtgattctgaggttagtttctactgggtattttctcttactttctaaagtaaccagtaagatatggccctagactcctccctgaagcatctttagttctaggttactatgaaaatgtggtgaagggagggcgctatgtctgatggcatccttgtctaccatcaagtctagagaatttagaagacagaggggcccaggtcccaaactgctacagcttttttatcagcctgccaggctgttgcacaggcttctctaatgtatacctgagcacctgcacaggccagggccacatctacagaggccccatctccctgggctgaaacagcataagtaatggttgtctcaaacacactgaggcagaaaaagattttctttaaaaatatagaagataacagacaacagaaagacctcagagaattttcaccccacagacatttgtccagagcctattttgtgccttggcagatgaggagataaatgtagacttgagatccaaattatttccaagtatcaggggctgaatctcagatataaacagtgaagaaagtggagaggaagaaaactcttcctctttcgaaaacttgtctgcaagggagatgtggtagaagcacagtccgggaggcaaggagacctgggttccaggctcaggtaatgttactaatgagtgctgtcacttcaagaaagttacagagtctttcgcagtctccctatttgtcaaatatggggagaggcagctgaaaaaaaatatcttttcaaggtataactttctgtagttgtacaatatatgattcctgccctcaaaaagtttatgatgtagttgcaagacactgaacagagaggaggtacaaaattaaattcactgccgcacagaagtatccagcgaatgggataaagctgtgccatacaccacagtaaccactagtcacatatgtctattcatatttaaaccgattaacattaaatccaatttaaaatgcagcttctcagtctcacaccagtcacatttcaaatgttcaacagccacctatactaatggctgccacattggaaagtgcagatatagaatgtttccatcattgcaaaaagttctattggacagtgctggtatagacaacatgtatcacagatgtccagagaacacagaacttcccttccatgcctcctaggcttgtgctcatgatggctgttcagcctgaccaatgctgactttgggtgggggcttagtgtttggtcagattattgccttgctctgggagctgagcagttccacactttccacattgtctctgctcctttgatttttccccagggcctttgggaaagccatagctatccagtcctgccttaaaaaatttccttttaagcagactcatgaataatctagataatcccagaattcaggcatcttttagagctccctgagctatttgcccatgaggtattgtatgcaaagtctgacaaagatcagtttgattgatcaatgagagtcagcattgtatttggggaagcaagcatggccaggactgaggaggaagtccttacatgctccctgcacagcactattaataacatgaaaaaattatccaatgtaatcccaaagactgatttcaaatcaaaacaaagcaaatacaggaaagcaaaacaaaagaacagcaagacaagcacaagggctccctagggttcctctagcttgtgggatgggtgtgggtgtgagcctgtgagagtgtatgtgaaagtgtgtgtgttccagatgtacatgagagtcacgtgtgtgtgtttgtggggatggtggtgaggcgggtaggcagacttggaggttttcagggttagggctgggcaaacgtgcctctgactcagaggaggaatctcagtttcttttggtggggagaggagaattaaacttttgtcaaacaacctcatgcctgattcctctaaagtggggtaggaaggacagtgtcataacacagagagtgttaatggctgctattttaacaatctaaactcactgccccagggcgccagtagaaactaaacagtcttactgcaaagggtgcatttttaaaaaatcaaataaatagctgcaggcgcactcacattgaacttgtgcccaattcagtgtcaatcaacaagtttccattgaattctggacaagccaactcctcttccaaagagaacacagaaaacattgtaagttcagtttgggggcagctggatgatcttatgtatcctgtccttttagtgatttttttccccctttttgcttcttccttccttctctggctagtacttttgttccctaattcagatcctcccaagttaattcctttctaatgcatctccctggctctggccctagtgctgtggttcttctattttatgttgctatacatgaggacagatcagctgatctgggcctcaagacaggtccacgtcatttgtaaaacaacagctttctacctgccatgtgttccatgagtagagatggagaaagtacccaaatatatacagtgtaatgctatggctccacttgggaacatgtacattctgataagccaacatgctgaaaaattatattatcccagtgatagaatgtgtcctaggcacatatttgaaactagccagacgtagccactaagccttagtgtaaaatcttcatctccatcttggtagtaagcatgttcccccttctccagactgaattctggccctgcattctaaaataataccaacaataccttgcatttattgagggtatactatgggcagggcactatgctaactcctttagataccttaattcagttaatcctcacaacagtcctttgagataggaactatcattgtcccatttctccctctctctcattcacacacacacacacacacacacacacacacacatacataccacacaatgtcacccactccaacatacatgctcacccacacgcttacatacacttacacttacatcaagtgtgtgtaaactgaacaaagctcctctgccctatctccatagtgctcagttcttccaggttctctgcccaaagactctccctttgacatccagaaatctatccttagtgaattcttacagttaagctaagcattgacctttctgctggaaggagtctcatcagctgcctttgtaagtggctgggagagagatgaggatatgagggactgcaagagaggaaaggggatgcaaaaagacatccaagaacactaaagacaaactgcacctcctccctacttttgcagtgggctggctctgcaaaataatgtctacccacaggatgtacaaggtcctttgagactgggcctccatcaatctgacatttccagcctcctccctcctacacagaccatactcaactgcagtcacggatcccacacatgcctctgcacgtgccctccccacctccctcttctacatctggcaaagtgccattcatctgtcagaacccagctcaaatgtccactcccctctgggactgtgcctgattcctggctcttggagagtgcctatcttctcccctctctgcctgcacagcccttgtccacacttctaccagagtactcatcacattacattttaataatcttgttatgcgtgtctcctccactagattgtgaactcgtcgaggcaggaactctgaaacctcagcaccatacatgggctatgtctcaaagcttatactctgtaaatgtttgtgaaattaatatgagtgagtgagtgaattaatgaatgtgtggactcataccaccaacttctggttaggaagagacgcccttcactaggcttctctgactaaggctgctgtccagtatttctcaatagagccaccactggaattttgtgtgggacacttcttccatgcgttgtgttcctacttattgtggaacattttgcatctcttgttgctgcccactaaatgccaatgacatcctcccattactgtgacgaacaaaacagttcccagacatttctaaagccctggagaagttggtgggggcagaaagggtgtgtgtgtgtgctgatcctccctggtttggaagtaacactacagcaatggctcatttccctgatcccagtggtctgagaggccccctgcagtacggacacactgtgctcctgcaagaggcgccagatgacagcctctagcaagaccacggattagcagaaggtaggaaccaaacaggagtaaggcagcctaatcaacacataatggtgaatcttgctctctctttttatgatttaggagggaggaggtatcagttctagccctcccccagaaaaatccccttcaatttctcaaggcagtctagagatttttaccttgtctctgagtgcattctcagcactaccttatgtttctgttaagagctcactcagctttgagaacatcagcattattgtgcggcatactcacacaggcacctctgaaaatctaatcagaaggaaatagaaaggcaaggcagaggtgatgccattaatttaatgccttttgcctgacagtcattaaacctgtcacttgtttcctttagactcccctcatcttttccctgaggctggagacacatggtcaatgcctggttatgaggctgctatcattgggatctagaggaacacgtaccaaaatgctatggtttcaggctttgcccatattgagatatgcccagatgaaatctggggacccaggatttaaataccttcttttcattgctgatcactgccttgattatatatacctccttatacttttcaaagcaatttcccatatcaactttcttgttcactgtcaatgcaaactttaagagaaggcaggaattatcatctcattttacaagctgagaaaataggtacaaagaggttaatcagctctgtgaatgtcccacagtgaactggaaggacagcagagcgaggccccatctctttattggccccccctgccttcctccccccatgataacacaataaaacctcactttgagggaaggcaggcatactccacaggtccaaagcccttcttccttcccaaaggggttcctgaccagcctgacttcctggaagccaaacatgccctctggccctctggtcagtgataaaatcctggagccagatggcttcatccagatgccaatacactgtgcactctacagcttagaaatcaatgcctcaaatgcctacttactaattccaagagcccacttagaggacaaggagcacacctttctctaggttttggtactgctattctttgtgacaaaaagacccaaaaaccaaaaaccaaaaaaaaaaaaatcaaaacaaaacacacacacacacacacacacacacaaaaccaaacatcaagaagaccaaaacaatgcaaacaagtagacaaatataacagtcccccaaattgccatatgcacatacagaatcctatgcttggttgtaatcttgcaaggtcttctggtacttttgcctccaatcagaaccatcaagaacaaatgaaaatgtaatcccactttatattatactgggaaatataacttacatacgtacaacataaatgtagagttgtactgatgctttcaaagcaaacacccatgtgactaccacgtggatcaagaaagagtgcattgccaacaccccagaagcaccaccccccaatggaggtcaactcaccaccatgctgactattgtgataatcatttcttcactttccattgtagttttatcacatttatgcacatccataatcaatatagtttacttttccctattttgaacttgatattaatggaatcatattgtatgcgtttgtgcatttatgtgtgtcttgtgtttactcagcattgagcctgagctattaatataatatattgactgtaaaatgacttcagcttcccttatctatgcctggaactacttttttgtgcctaagttttttatactgaagctcacttctactctttctccccctttggaagtggaaggagaaagctgatcagcctcctctaagacccatttatgtttctgaaacttggtgaaggcccctgtctttctttcaccagtttcagtaattacagttttccttcaacatcacctcataggtttcatactctaatcctttaataatctttctaataaagctatgttgaatggctccagacacaatttccctcagaaagcaatcgcagaagaggcccttttggaaaagtacttctccagataaagagaaacaggggtactgttctattcctatggatttctccaaaagcagatgacaaaacttgccagtaatcagctcctaatagatgacactctctgaagttccctggggaacattaataaggaacacgtctttcaaaacctagcatttcacacaggcagtaatactagttactgcttgtcaggcctgtcattttcaaagacagtgtggtctctggagtcttccagaaaaaatgtgttctgaaaagcaacatttgctagattcctctaagactctttggttgtctcctgacttcacttcctcatttctaccaccagcctcttctcaaatttcttctctctcttccccatttgaaaaagagacacactacatcctggatgaaccttaaagacattatgctaagcaaaaaaagcccatcacaaaaggataaatacggcataatgccattcatatgaggtactgagagtagtcaaattcatagagacaggaagtagaaagtgaggagttagtgtttaatgggtatagagattcagtttggggagatgaaaatgttctggagatggatggtggagatggttgtgcaacagtgtgaatgcacttaatgttactgaactgtacacataaaaatggttaaaatggtaaattttatgttatggatttttagcacaagaaaataatcacaaattaaacaaaaaagagaatgaaaataaaaaggaaggaatgagggaaggaaagaagggaaacaaagaaagaaaacaaggaagaaagcatgccacatttccttgtcctctccttctcaatatccatttctctattaaaataataaaagaatatattatataaaaggtatgatagtgagtgtggactctgatttggccttagatccctgagggcacaatcttgtgaatgtgaagaaatcaaaacaggatgaatttattgaagaaaagaaaaagagcttgtggggacacttacattatcttcatgttccaaaaaataacctcaactcccaagtttgacgtatttctctgtcttctcaattaaactaaaatccaagcagccctcttcctccccctcctgcagacagctttgatttagccctttactgagagatacagtacatatatttcttagcctatctccaattctgggagcataactctagaaaacactttgtaagtagccatacatatatttgctgaaccacttcccagtctctgtgtcttagagtatatgtggcaaagacaaaagacaacacatcaagacatttataaaatagactactttgatggccaaaaatggagtcctgtgaggaggcggattttggaacagatttcaataactgacaccctaagtctgccagttcctaaaatcacttttagggaatagctgatggtataaaattctaaacacaaaaatcagacaaaaatcattctaataaagacaattgcttatcttagtggctgcaaataatctggcaaaccttttgggttacagtcattttaagtccaaaaccctgaagtaaaactctttggctctaggcaacagatagcaaggatatctggttactttgagaacatattggttttaaattaacaacactaaagtgaaaaacttgagagctggcaactcattctagaaaccactgtgtcctctgctacaaataaagaacttatcctaaatactactggtgttctgcaggactttggggtaggtaaagcttgactccttaggcccttccttcaacaggcccctctccctttgtaactcttcaggtgcccagctgagcttagtggcctcgggatcttccccccgcaacacctgtctcctctttctacaatcaaaatctgctttctaaatcctgtgttcagacgaaagtaaaaatgattaataagagttaatttactaccttcaaagattggtgaatttatcaggacaaggcctaaatttaaaagattaagctgtaatgacaatttcaggtgtcaggcaacttggcagggaagtgggggtgggcttgggcaaagctgatccgatggctggacaggtctcagaatcacaggtcacaggaaatcaaggtaataattgcctcttctgcttactcaagaagaaaacaggccctggttcaagggtcagtctggcaactcagatgaaaagcccactacaggacattttgctaatcctttccttaaaataccctagatgtgactcttatttcaaactaagttaaaaacagactaagctgaaaacactgattttatttcaaactatgttgattgcttttccctttgagagtttcatttgtttatcagcagaaattcctgggctaattccgagaaatgccattcatttctcgccaacaacaagtcatgaacaatgggcggggtagagggggaagctccccacggagggtcttgctttctggacatgacagccaaggactctgaatgtggaagatggcagaagaggcagcctttgggtgggagctctgggaaagcagaggggcaggccagatggcacattgtgcacatgttactgcagggttagtcctggggaaatgtcacacaaggaaaatgtgtttccagagtgtctatgtgctccattatcagcgaaacaatgttgtcatgttgcccacagccctctggagatcccactgctgcaagatcttacccagaacggctttctgtgggcagttctcttgacctcctttctcaaaatctcccctgggccctattactgtagtgcagtcctcaatccgactgcatcagaattaactgggatgcttgtgtgaaatgcatgacacccactgcagcctaaatgattcaggatttttggtgtagggtctgggagtctgcattttatcaaatctcccaaggtgatccttaagcatgttaaaatttgagtagtactagtttagggtcttgtgctaaaattgcctactaccctaacaaacttctccaaactaagatactgtatataccaatagcttattgctataacatacattgctcctagaaattgaatggcaaaatacaacacttcttgaagcacataacaaagaaccctaattctgcaaagtgcctccaaaaaatgggtattatggctgaataaatttagacaatgttacatcccatatacctctctggtagattcataatgggtactaatgtatcaaggctctgtcatataaatagacaacaagtatataaaaatgctcaacatcactaatcatcagaaaaatacaaatcaaagccacaatgaggtatcatctcagcccagttagaatggttatgttcaaaaagacaaaatgtaatagattctagtgaggatgtggagaaaagggaactcatatgctgttggtgggaatgtaaatcagtacagctactatggaaaacagtatggaggcttcttaaaaaagctacaaataaaactactatatgatccagcaatcctactactgggtatatatccaaaaaaagggaaatcagtgtattaaagggatagctacatccctatgtttatcgcaggaccacacacaacagcaagatatggaatcaacgtaagtttccatcaacggaagaatggataaagaaaatgtggtatatatacacaatggagtattattcagccataaaaaataaagaaatcctgtcattcacagcaacatgaatgagacttgaaaatactaagttaagcaaaataagtcaggaacagtaagataaacaccgtgtgttctcactcatatgtggaagctaaaaaagttgatctcatagaaacagaaagtagaatagtggttactagaggctgggaagggtaggcacgatcttgtctcactgcaacctccacctcctgggttcaagcgatcctcctgcctcagccttctgagtagctgggactacaggcatgcaccaccacacccagctaatttttttgtattttaaatagagacagagtttcaccatgttgaccaggatggtctcaatctcttgacttcgtgatctgcctgcctcggcctcccaaagtgctgggattacaggcgtgagccagtgcacccagcaaatgctactttcttgaagaaggttttaaccccttgtactgtgtcaagtgtccaaggaccaacagtatgagaaaaatagtggaaataaggcatggaagatggttaaaggggtctaagagaacagtcagtatggacatggagggtctagtgatcaaaagtgaacatctcctttggcagcccctctgtaacctaaaatagtaataataataataaagcaaaatatctgctattcagacaccaacatttcagaatcctcaggcttttggataactctggacccatatatatatatatgtaattattatgtgtaatatatataccaatcttttgcaggcaaaggagtggctcctggttgatcatcttgcacactacagctattgtagtcaccttactagggaaaacaatatgctaattggctgttactgttaaaaaggaattgatctgttttgataaaatccaagagacaaacgaatatagaattcagaagagaatagaagagagaagagagcaatggagatcagatatggatggtggcaaaagcagcaaatcagcagcaaccatgaggatggctggcagtaggtactcaaagaaatgaactaaaagaagatggggcaaccttaaaatttaagagagattcctcaataaattaaaaataaaattaccataagacccagaatttccactcctaggtatatacaaaataattgaaaacatatgccacacaaaaacttgtatataaatgtccgtagcagcgttattcacaatggccaaaaggtggaaacaacccaaatgactaccaacagatgaatggataacgaaagtggtctatgcataataatggaagattattcagccctaaaaagaaatgtcatactgatacatgctacaacatgggtgaaccttgaaaacactatgctaagtgaatgaaactagatgcaaaaggccacaaattgtatgattccacttatgtgaaatgtccagaataggcaaatccatagagaagtagattcatggttaccaggggctaggggaaaaggggaatggagagtgactgtgtaataggtttccttttggggtggtgaaaaatttcagaaactagattagtggtaaatgttcttaccacttgtacaatattgtaaatgttcttaatgccactgaattatacactaaaatgatacattttatgttatgcatcttttaccacaataataaataaataaatctctcttttgaaccttccctagaaaaaaactggaggaaacacaaaaggcctgtctacttgattactgtaactgtggaagtcacagatatagacagacatagtcatagacctagactctagactcctttttaatataaatacatgggatgggagaaaaggggaacacaagggcagataggtcagtgattaaagacaaaaaaaagcagattcagagtaaacaagtgattttcaactcttactctaaacttgtctacagtcaaatgccatgtacccacctcatcttacacagtctgtgctatagtgtggatttgtgtaacacaagtggttcatatgtgagtgctaaataagggaatgaagttggtataaaatagaaattgcattagttcatacatgattacccagcaaattaatattttgcactaccaagtgacagcagctaaaagccaagtacactaactcaactgaaatcaggaagccatttgccctacattcttcctcttgcctcagttgggccacatgctctgtcttgtaagtgcttattacatgattctccgtgatctttgtgcaatttactgttgtctctataacttagcagcttcaatccttccttaaacactgttccttcaagctaatgttaccattttaaaaggtgaagtctagaagtctatatttactgtaatattttattagaaatgtaagatgcctttttaaactgtgttagtatttcattagtatagttgctttgttaatattctggttacaaagttgcctaagttttgagtggttttctctaatgctactttttccttaagccctgtgatttttcagtgtacaattttgtagaatgtgaggattttcagatatgtgcatattgtattgtggcagaaatgcctgtgtttgctagctcactcacaacccaactattgttgaaagagaaatgacacagggcttcccacattctccttatgggaacacatactatagtgcaacactggtaaggtcttttccctaacctaccttgaatatctaagactggggtgtctctcttggcaaaccacactgtcactattcctattaaaaccattcatagtgccaaactttttcacacctagccaaaaggaaacactgtggattaggtctctgttaaccagatcaaatcagttattttggcaattttataagagctctttaataacccaggaatgctggaatacctccaggaaaacccaaatttattaattctgaatagcaaattctcagtggaatgaccattttaaaaagccctcttagataatatcatgatttagactcctgatcactataaaattcttctttttgtgataaaattctctctctgtgcatatatataaaataaaatatatatattatgaaatatatacatacacatattatgaaaataagtcatgttgttttactttcccttccagcattaccacttcattcccccaaaagagaagatagggaatttaattccttcaaatcactaaaatctcttaattatcagggactccacagagtcttgcttagagaccaggatgaatttaatgacgttcatgagtcctatgcagtcttgacttttccattaagaatgttccagcctccatgtagcctctttgggcccagtagagcactgtggtatgtgactaagacttgacctctgccaagacttggacaagtgctgatgaaaaaaaatttatttgctctttgtgggaatcagtatagatttctctctggtatttctggaagagctgcctgcatactctgatttccacggtttagcaggagctgtaggagacaatttcaaatacaggtgggctccttggaaattttaggggtaacgagtttagaaagcaagagccatgggaaatacataaacaaatgaaatgagatggctcctctgtctccttcaatggaaactaagctctaagcatgataggtaggacacttccactgagtctgttaccacctaggcaaaagcttctctaaatcaatactgctataggacagtatgtaaagccagtatctggggtatacagtttgcttatttgtcgtctttttatacggagcttattcatcatcttggctttaaatattttcttcttaaatgaggacattttcatcacagtgccttccattgggttaagatggaaaaccagagcccttttctttgaccaaacatttctgtggccctgaaggcatgagtttcctcatgcctaataatcactggggtggaaggaacacagaggagtcatcacatccattgccctgtctcaaagcaggactgtgccaactctatctcagatgggtgggtacctttttatttctagaaatattaagtaaagagactaaaattatccttagtcatttattctaggatttaacagccacggtgttcaaagttcttccttttgtcaagctccactcctctctgctatgatttaaagctatttactcttgttttatcttcagtagaaagaaagaatagctggttgcattctggttcaatatggcaaagagaacacatgagaaatctccctgttattttcaaaacaaagagagatgaaatgtggaactagaaaaataaataaataaaacgtgaaaactgcaaaattatattcagaaacacaaaaaaactcttcgtggaataaaatatagaaggaaagtacagcaataaatgggagccaaagccatatggtccatcagcagctgggactgaatatggatagtttggatccaaatggctgaggagaaactacagcttgcaagtggcttcccatgtgaagttggggactagggtcacactactcgcatgtaaacaggggctgacatagctctccccactcagtgttccctaaaaaacactgattgtccaagttaggcagttgtagatgaggcagttgtagatcagtccatgatcattatcagagactagtagtgcacaagaaaacagaggtagaaatagaccattcaggcatgaggcagcccaaaccgagtcattaatatatgacctggtttagagcaaagtgaactataaagcctgcaacaaccatcccacaaagaagggctcatgtaagaaaaaacaaaaacaaaaacaaacaaacaaaacaaacccaaaacacccatggataatgagctttgaaagaaaaagtagaaaaccaaggaaaattcagaactaagaaaagctgtcaagaaacccaacaaaggtgacaattcacatctaaaaatatttagatatttgaacaatctgaaatggacttcaaataaacttttaaatactttaaagaagtaaaaaagagaataagattccccaaaacaataacaggttataaattagcatcatgtagatgtctttttaaataacttgaaaacctgaggggaaacaaggttattgaaaataaacaaagaaacaaacaaaacccaacacatggcctaaatagtatgcatggaaagaattcatgaattggagaacagagttgaagtaatatatcattttagggagaatatcaggagggaaaaataaaggagacattaggagacataaaggataaattaaatgagatgcaataatatacaccaaagacaattttgagaatgagaaaaaataagaaggtgaagagataattttcaaaaaaaaaactgactaaaaattgaagagaaatttgactcctttggctgaaaaaatcatgtgctgagcaggctgaagagaataatcaaacttacacatctcattgtgtgcatcaatgaaaagaagaaagttttaaaagctagaagaaaaaaaaaacgaagaacccgcaaaagaactacaaatagcagaattcttaaccacaaacaaataaacaaacataaagccaacaaaccatttagtaatatcttcaaagtgctgaggggagatgaacatgcacctataatttcatacccagccaaattatcattcaagaatggttgtaaaataaatacacttttttgtatataaggactaaggaattttagaactactacccacagaaagagctgttaaaggttatagttaacaagaagaaaaatgaactcatggagaagtgagctgcaagagcaagaaggaaaagaaaaggaatagtttatttctatcctccataccataaaatgagctttttaagtcttaaccataatggtgtttatttctttcaacgctttcacctctggaatttttgagctcagttcttttaacactttatttttctctcaaaataactgctagcttatactttccctttttctcaatacttgcttcctgttaggcagctggggtaggtgcagccatattctattctatgttgttttgccccatgctctgggtctgggtcatgcctcaaccttcttcccagggaagaacaatctttacacagaagtttagataagttcctatgacattagaccacttttggagacttctgaggaataaaaagcttttataaggctgtctgacaggctacctggcaggttaaccaaaaaacaaaaacaaaaaacaaaaaacaaaaaaacaaaaaaaaaaaaaacaaagaagctctccagagtggcaactttatcagaaacattgttcccatttaccagagcgcccccacccccacccataccacattcttgcaatccagtttaggaagaagaagcaaataaacacatacagaaacagtaagcctggcttagggacttattccaaaaaaaacccaacaacttttaggttggtcatatgccaagtcaatctctgacatctcaaagcatatactatcagcaccaacactcagaatttaaaaacctgtgatatggcatgatattctgccatctggaaatgaatcacctgtgttcattagggtgtatttactgatgcaggaaaatatattttataaaggtagtgacaaaaagagtttgggtgtttcttctccattaaaaaaaaattctccactcttggaacatttcagttgactgggttttcattgaaccccattcccagccttattcctaacatttttgcctggatacatttggtttctctcttataagttctggaagttcctcaccacttaaaaagcaccgtctataccttagctggggtagtggttcttcctgtacacccctttgggactgacaataaagctgcggatgttctctaaaggaatttacaaatatacatagttacaccaaaaactgcaagcaattttaaagggttctctgaccctcaaaagcccatccaggaaccctagttcaagaatttctaccctaaagggaaatggaatcaacttacaggatgataaggcttctacttcacaaagcccaagagtgtcaagtagctttttctaggattgccactgggcccacaggcattctctgaatcactccacacgcttttggggtgggaatcgggccccagtcagacatgaacaaagtgtcattgagggagcccctgcctcagacaaataccgtagctgcaaatcgtgaaagtagatgtcctaacagttgtgtgaaaaattctctgcctggctgccccttagaattacacttaacaatgtgtacataataactgcagtctggaggaggtgactattcagcaggcaggcagctttatactgtcataaacctcactgggtcagctcctttgatttatgaatggccccctcataatttagaagctatgctcggatgcaattccagcactaattgtataagacacatgccgccatgctgcaactctcctggtgcctgctgcccatggcaggaagaggctgcttatagcagaaaatctctgggccacaatttccatctccgattgacacccaccttcaaatgattaaaagcccaataaaaatctgttactgggtacccaataacttattagagcctagaatgtaccccatttgggctataaaaagtatttagaggccagtttggactgcctaaaggttcctattgttatctgtctggaagtttcccttctggggaattatggagatgagttgagttgggtgaagagggaaatggagaaccacagctaggaaagaaagagacaaattgctttacctgggcagcgagggcagcacagatgaggaatatgcacaggagaaaggcaatgaacatttggacatctgactcggctgcaaagcacattcccattctgaaaaagagaaggcaatgagaaaaaataaatgtctttcaaaggtcgctgggatcaagccagtttgggaaacagtcatgcagggactcacccaggcagtgaataatgcattcccaagaagctgaatgcattcaacattttctttccttttctcatcaccagcacctctgctgggttggttgatagtttattggcatatttttctaaggctgagatcaccactcctccaattttcaaagcttcccattaattgtgggaggcttcttctggcctggctccatggcatttctaccattccccagctctagctgcatgtcttttccaagaacctactctgatttcataatcacctgtccaataacatgaaagacacaatgagcaatgggtcccctgagctgctacccagccctgggcaaggaggcatccctagcaggtggatcctggattccatataaatctgccttggcccagtgggccaagtgattcttctcatttcctttttagccaaaattcttctgaggacgagctagagtttggaatttagctgattaggtagtatgcctgggtggggcgactgggtccctgcctgatttacaattacaagacccctcgctctgacagctcacaaccatttctagaacaaagacatagtctggaaataaatttttcatttacattttccatccataaatcatttgcagcaagggctacttgtatttgtcaggctgttgtgggggaagaaagtagtgaagaggatatagaaatagaaaatgccttgtgcttgagctgttggcattgggatcattttaacattttgactgcgttgcagacatcaaagcctcagctcccaatggttagctgtccatctccaacgtgtcgaaatgtgtcgcgtcaagaatccgacaaaatcaggccatcccaggcagttaatcaatccccaaatgatctatttaatacatgccctaaccatttaaagaggcgggcttcttttatccaaattggaattgccttatcccaaccttttccttttcttgtgtactttctagaataattttttttggagtgttgcatttggcaacaccacagaagctcctcaggtatcacactcctcagaggcaggtggtataatcttgaattgagatcactgaagcacatcagaaaccacacctcccagctgaggtctaaagtgaatcctcattaatgctatatactgaattctgttctagagctaatagattaataataataacgatgatgatgataaccacaatgataaggacaacaatgatgacaataacagctgttaacatttcttgaatgtttaccaagactaagtattgttttaaatgatttaaatggatttgtaaatttaatccttatcagaaccatatgaaatggtaatatcattatcccatttataaaaagaggaagatgaatgaatatcacagaggtcaggtaacttgtccagtggctcataagtggcagaggcagggctggaaacttggtctgtctttattctagaacctcatagcctcttaatactgcctgatgttacctgataattatgtttccacatgctcaaaattctgacagcccaaaattatgttcaaatggtaaatggatcaggcttgcaagtgattgttcctgctctagctgggcatgagggaagaggtgcagtccttacaaaaggtctcaggtaagaagctggtcttgaaaattctttgtgtaagttcagaattctcaatgcctagtacaaggcctccctttccaattagcctagtgcaccacttctctaccaggggtgatttttgctccccaggcaacttggccatgtctggagacatttttggttattaggattggggttggtgctcttgttgtctaatgggtagaggccagggatactgcttaacatcccacaatgcgcaggacagcccccaaacaaatatctatagtgcaaacaagaaactctagcctaacatataatggcagaggtttgttgagaaagatggaccacagctgtgctcctgggtcaagaccatgggaagaagatggaacaacctgctttatctattgcaaagatggcatttatgccaaccaaaatcctttctaaatgactggacaagagccaaggctaagccaagggagctctaatccttaagaggtacaggccaacgtttcacaaactcagtcttaattacagttattggctgagacaacatagaatccactctcccaatgaaccagtttataatttgtcctaatattctccctaaaggtcagccttaaaataattttcaaaaactactttgtcttacaatctaaacattctattgagcttttgcctccactcccactatcaggctcttctgccttctctaaccatgccctatatcattaggctaagagatcataaatatctgtccatagtaaatattcagagaacccatgaaaatcaagccaaaaagcaagagaggacagaagacagaaaatgtttatttttcttgcaatcgtcttcttactttcttcttttattttatgagatagggtcttgttctgtcaaccatgctggagtgcagtggtataatctcggttcacttcagcctagaagtccccagctcaagtgatcctcccacctcagcctcccaactagctgagacaacaggcatgtgccaccatgcccagctaatttttgtactttttgtagagatggggttttgccatgttacccatgctggtctagaactcccgggctgaagtgatccacatgcctcagcctcacaaagtgctgggattataggcgtgagacagtgcgatcggtctgcttctttactttctttaaggattttatcatccatggtccctggccatttgggcactgaaagcctctcggcatgctgaggagcaaactgggaaatcacatgtcatgagagattgtacctctgagcagatgcagttcacgcagtaaaccaacccataaggttccaggtaaggatgccatctctcacccactctgtacttcttgtcttgaaacatgcaatatgtctctgaatctgtgaagaaggagatggagaatatgcctgttaggaaacatcaaccaagtcacaaaattcaaaagcaatcacaagttccatccattttattatacatcaagagaagtggcatagcaagtatttatagaattcctattaggggattagtgttatacatactttgctcactggatcctcaccacaatgacccataaggtagatattattattagtctcattttatagataaggaaaatcaagagtcatataaccagtaagaagctgagatggaactcaaacccaggtttgtctgacaatgatgtacaaaatctttttaaatttaattttatttttccataagttattggggtacaggtggtatttggttacatgagtaagttctttagtggtgatttgtgagaccctggtgcatccatcaccctagcagtatacactgcaccatatttgttgtcttttatctcttgtccccctcccactcttccccccaagtgcccaaagtccactgtatcattcttatgcctttacatcctcatagcttagctcccacatatcagtgagatcatacgatgttcggtttccatttctgagttacttcacttagaataatagtctccaatctcatctaggtcattgcaaatgctgttaattcattcctttttgtggctgagtagtattcatatatatacacacacacatatatatatacacacatatatataatcaatagaaacatatatatatatatatatatacacacacatactgactctctgtctctgtctctctatctatctatctatttatctatatgtttctttatccactcattgattgatgggcatttgggttggttctacaattatgcaattgtgcattgtgctgctataaacatgcgtgtgcaagtatctttttcgaataatgacttcttttcctctgcatagatacccaacactgggatttctggatcaaatggtagttctacttttaattatttaaggaatctccacactgttttccatagcggatgtactagtttacattccctgcatccacaccaacatctactgttttttcgttttttgattatggtcattcttgaaggagtatggtggtattgcatttgattatggtcattcttgaaggagtaaggtggtattgcattctggttttgatttgcatttccctgatctttagtgatgttgatcattttttcatatgtttgttgggcatttgtatatcttcttttgagaattgtctattcatgtccttggcccactttttgataggatttttttttcttactgatttgttcattgtaaattctggatattagtcctttgtcagatgtatagattgtgaagattttctcccactctgtgggttgtttgtttactctgttgactgttccttttgccatgcaaaagctctttagtttaattaggtcacagctatttatctttgtttttattgcatttgcttttgggtttttggtcatgaaatccttgtctaagccaatgtctgttgcgggaagtcagggaccccgaacagagggactggctggagccgtggcagaggaacataaattgtgaagatttcatggacattaaccagttcccaaacaatactttcataatttcttacacttgtcttactttgatctcttaatcctgttatcttcgtaagctaaggatgtacatcacctcagtgccactatgataattgtgttaactgtacaaattgactgtaaaacatgtgggtttgaacaatatgaaatcagtgcatcttgaaaaagaacagaataacagcaattttagggaacaagggaagacgaccataatgtctgactgcctgtagggtcaggcaaaaagagccatatttttcttcttgcagagagcctataaatggacatgcaagtagggaagatatctctaaattattttcctagcaaggattactctgggaaaggaatgcattcctggggggaggtctataaatggctgctctgggagtgtctgtcttatgtggttgagataaggactgaaatgcaccctggtctcctgcagtaccctcaggcttactagggtggggaaaaaccccgctctgggaaatttgaggtcacactggttctctgctctcgaaccctgttttctgttgtttaagatgtttatcaagacaataagtgcaccgctgaacatagacccttatcagtaattctgcttttgccctttgagttgtgatctttgttggacccttatcaggagtttctgattttgcccttgtcctgtttcctcagaagcatgtgatctttgttctcttttttgtcctttgaagcatgtgatcttgtgacctactccctgttcttgcaccccctccccttttgaaatccttaataaaacttgctggttttgtggctcaggtgggcatcaccatcctaccgatatgtgatttcacccccagcggcccagctgtaaaattcctctctttgtactctttctctttatttcttagccggttgacatttatggaaaatagaaagaacctacgttgaaatattggtggcatgtttccccagtaaatgtctagaagggtttttccaatgttatcttctagagtttttatagtttcaggtcttaggtttaagtccttaatccatcttgagttgatttttgtataaggtgagagacgaggatccagtttcattctcttacatgtggcttgccagttatcccagcactatttgttgaaaaggacccccacatttatgtttttgtttgctttgctgaagatcagttggctgtaagtatttgggtttatttctgggttctctattctgttccattggtctatatgcctatttttataccagtaccatgatcccaaatttataaaacaattactaacagacctaagaaatgaaatagacagcaacacagtaatagtaggggacttcaatattccactgacagcactagacagatcatcaagacacaaagtcaacaaagaaacaatggatttaaactataccttggaacaaatggacttacaagatatatatagaatatttcatccaacaaccacagaatacacattctattcaacagagcatggaactttctgcaaaatagaccatatgataggtcataaaacaagcctcaataaatttaagaaaatcgaaattgtatcaagcactctctcagaccacagtggaataaaactggaaatcaactccaaaaggaaccttcaaaaccacacaaataaatggaaattaaataacctgctcccgaatgagcattgggtgaaaaacaaaatcaagatagaaatttaaaaattcttcaaactgaatgataataatgacagaaccttatcaaaatctctgggataaggctaaggcagtgctaagaggaaagtgcataaccctaaacacctacatcgaaaagtctgaaagagcacaaatagacaatctaaggtcacacctcaaggaactagagaaacaagaacaaaccaaacccaaacccagcagaagaaaggaaataaccaagatcagagtagaactaaatgaaattgaaacaaaaaaaagacacaaaagataagtgaaacaaaaagctggttctttgaaaagataaataaaatcgatagaccattagcaagattaaccaagaaaagagagaaaattcaaataacctcactgagaaacaaaacaggagtatcttcaaatactgaaatacgaaagatcattcaagactactatgaacacctttacacacataaactaggaaacctagaagagatggataaattcctggaaaaatacaaccctcctagcttaaatcaagaagaattagataccctgaacaaaccaataacaagcagagagattgaaatggtaatttaaaaattaccaacaaaaaaaagtccaggaccaggtggattcacagcagaattctgccagacattcaaagaagaattggtaccaatccttttgacactactccataagacagagcaagaaggaaccctccttaattcattctatgaagccagcatcaccctaacaccaaaaccaggaaaggccacaaccaaaaaaggaaactacagaccaatatctttgatgaacatagatgctaaaatcattaacaaaatactatctaactgaatccaacaacctatcaaaaagacaatccaccacgatcaagtaggtttcataccagggatgcaaggatggtttaacatatgtaagtcaataaatgtggtacaccacataaacagaattaaaaacaaaaatcacatgatc

SEQ ID NO: 883 - DNA, 2481 bp, Homo sapiens
  Genbank Accession No. AL049257
gggcaagtgtgcgtatgtaacaagcttcactgtttttatagaaggtgaaccattagtataaatggtaataagttgttccctaaccctccacatacatttgcctatcacacgtaaaattaatatttactctagtgaagtggtttgagcactaaccttgtacacattgttaagaggcttagattggtattcatacttatttaccatacaaaagtatggtaccttaaagcttttgctctatgttctttactgtttcactggaaagtgtcaatagagttgcctaagaataaaaattgaaatggtgttaatctgaaaattaatgatcctctgtaagcactgtagttgaaaagagagtagcaattaggatgatcattttgtgtaaaattcattaaaatagaaggctgctattttttgcaagtattttaaatgtcttcatttttttaagaaaggaatagcgatagatttatataaatatctaaatgtctcagtagaggagtagaattcatctggttatcacctggtcctctgaagttaactgatgggctaaccgatttgtgcacacacttaggatggatttatgttaagggaattacttactgactgttcaatggaaggaagtattaataatagggaataagtttgcaactaatctcatgctgcaaacttgtgttaattctgtttaatatacaaatttggatagcttaattataaacatatttttatatcaaatatacagttctaatataaaagttataaataattatttttgttaacaaagacactaaaacagtatgttctggttttggccctcttgcagaaagaagcattagaaaaattactttaaaagtagctatatgttactgtattgcaaaatctgttaagagcaggaccacatcgatagtatttaataatttgttctacctcccaaaacacagttcttctttcagcttgtcttaagaatggttgccaaaaacaacagccaaaaaaaaaaaaacctattttattatccaaatgctagaaaacacacatgaattttctataaaatcacgaatatgaagtaccaggtttagtcttactttagcaatgatagacaaaagcgaataaatacatcacagacagaaacctttataaaaatatatgattctataaagaatcattagaaattatgagtggaaattctccagaaagatagtattatagagtcttttgaagcaatttcttgagaaatagtaaaatctggggcagagtgtcttgcagttaattgcatattgtcagagcagcatgagaaatatggtatttggatagggatttcagcaactaaacattctctgttctgagatctctttattcctgaataatgaaagaatagtactttggtgctgacaccaatgaggcacttctcttggtcctagtagaggatgcagtgtactgttaaaccaatatcatcacatctcgagtcttatcaagttttcattctctgtcaatatgacaagctcaaagtgacagaatatgttataggttgaagcacacatatttgcagtttactgaaaagtagatttcttatgtgacttttttcccttctcagcaaagagccctacactagatttctaccatcactaatatttggaagtatttcattactaacaatctcagtacaacatgaaaattgttgcttctcatctaaaatacaattttgtctatcagaataaacacaagtgaaattttcacctacattaacattatgtctttgcagctttaggtttgttagatgtgttcttaagcataatttttagccacaaacccattgttagatacatatctatggatatagatctacatctatagatatagatatacacacatatatatactcacacacatatagcataaaatactcagcagggctagttattccgatttcttgcacaattatttagctttttgtaagttcaacatgtaaattttaaagacataaatatagagagacttatgtgtttgaatataaatgatatatatggattagcatgtacctgtatattattaaacatgcaatgaactgactggtaagtgacgtctaattgtatggctagcaatgtaatttattcagactgtatttttgtacagagcagtgcactctaacctatgcctctgtgtcctctttaatgcctaaagctgtgcctagaaatttcatctgtcttaaaagtaaaatatacttcatgctgtttatgctattagtttctgtactgctattctatatttattatttttaaatatatgacatgtttactacttaaacatgaattcatggtatcctggttattttttttaagtcatctgggggaaaacctgtttatcactccagtgattttgagtttgcagtttcacaatcagttcttcatttcatgatttttgtagttgacatgaagtcatctatgtggaaaaaaataaaaataaaagtgatttcacggaaaaaaaaaaaaaaaa

SEQ ID NO: 884 - DNA, 1746 bp, Homo sapiens
  Genbank Accession No. AL049423
gatttcttttagtcatgttgatttgatttcagtttctggctatgaaaaacatttttaaactcgtcacccacaacaaactgaacaaaactactacagtgaaagcccttttcagtgaaagatgtcagaaacctcaaaacctttggcctgactcagaactaccatgtgaaaatcagtactctcttaatgtttgaaataaaaactgaaaaaaaaaacaaaaaaacaaaaaaccttttttgaagcaccttaacgtggccatccatttgagaagtgggtgccactttttttctttgagcaccttattgatgtgtttgctatctgctgtctttctgttacctgttggctgaatggctagctgttaacatatacatgtgcacagaagagatatctgggcatgtatgttctcaatgaagtttactgtggtgactgctgaaaggtgaacccatttcctgatttttcccgccgcagtgttgtgataagattcgaagaaacctttttccctgcacagaaatgtttcttatcacattgtatcttagtatggaaaggaatatggtcccttttttgcaattgctactgtgtacacacacacacacacacacacacacacacacacacacacactctgtatgtttagacctaaaatacacacacccacgcacacactgtatgtttatgtgacctaaaacatacacacatgcacacacacatacatatccattcattcattcattcaagtggtgtttccagtgtctgtgtgtcactgtttatgcagtttccatttcccagtgaattatgagtggagggcaacttttctaaccagattgtcttttcagaacaaagacctgggaattgaggaagagtttggaaagagggagaggcaaggaaagagagctttaaattgaaaggttaatttcctaagaggaacctgggctgaatgactacagtgttataccctccaatctttgcaggtgggcatggaacactgcttgtatcactctgtgcacggtataaatccatatatccacaaaaacacacatccatccatcaacatatacatggtttgggatgagcaggtcaatagttttgagagggagtttgttcctttttttttctcattatactcttaaattgttgtcagttatcaaacaaacaaacagaaaaattgtttggaaaaaccttgcatacgccttttctatcaagtgctttaaaatatagactaaatacacacatcctgccagttttttcttacagtgacagtatccttacctgccatttaatattagcctcgtatttttctcacgtatatttacctgtgacttgtatttgttatttaaacaggaaaaaaaacattcaaaaaaagaaaaattaactgtagcgcttcattatactattatattattattattattgtgacattttggaatactgtgaagttttatctcttgcatatactttatacggaagtattacgccttaaaaatacgaaaataaattttacaaggtttctgttttgtgtggaagagtaattgatgttgctaagaatgatgtttgtttttttggggtttttgttgttttttttttaaatgttaccagcactttttttgtaagtttcactttccgaggtattgtacaagttcacactgtttgtgaagtttgaatatgaaggaataattaaaaaaaaaaaaaactcttaaaaaaaaaaaaaaaaaaaaaaaaaaaaaaaaaaaaaaaaaaaaaaaagggcggccg

SEQ ID NO: 885 - DNA, 2905 bp, Homo sapiens
  Genbank Accession No. AL049471
gcataaaaacaaaaacctcactggcagcaagctgccgaataacaacagagtctagaggacatatttgtgggctgcacagatattttaggaatttcagaaattagaacaggagccaaaatgatttacattggcgttggcactgattcctttaaatggtctgggaaagggggttgggaagaggatggagctcaactggccagaagaggagcagctgcagtcctgatagcttctctagcctcggtcttttgagtgataagtagtcatgttgttttcatccagttggtttcttgtcattcccaagaagaatctcccaggccacatctttggggataactgacatactggattagccttttcaaaagaaaagtcatcctatttggttttatggggtgtgagttttgtgtgtacacacacagaaacatgtaaggtggtttgggtcatgtttttaaccacctggcaatacagtccactttctggtttcttttattgtgggaagtaaatggtcaagctgctcaggcagtgaaaagatgtggagaatgtccgttgtcattcttgccactgtattccatttgctaccgagatataacattaaggtggacacattttctaactgtattaattaaaagtcaatggatacagagagtggattttctccccaagtcccatccctgctgaagaccgcttggatgaactccccaacccactgtgcccctcccgcaacactaccagtagactttagaaccatagttaactaagtcttttacctctgagatacttaattctgggaaaattggtgacaattttcaacttctaaataggtaactcgactgcaaaataatcaaaactgataacaatgaaactgcggctcttaaacaaagccatgcatgccgtgcatttgtattgaaatgtctccatgatatgaagccaaatattcaatgtaacatacttaatatccaaaggtggaaacaaaagaatgtagagatccagtgttaagagttccatttgcttcaattaattatttaccttcctgtggaataatatatatatatatatttaatagaaccatagatagactagtagaatttagattataaatgtgtgagtgcagattatcctgctattgcacaagctagaggggggaaaaatctcaattccagctggcaagatgctagccaggacacatataagaaagttgcactagattgaatggtcacagaatcggaggacatggaagaaaaaggaaacttcggtggttctgcagcagacatgggctaggtcatatgtggtttctatgagttcgtgtctcaaaaaaaaaaggagggggggcatctgtccccggtggagctcacctatttggaatatggggcatttgttttttccactgcaatgatttcagtctggtttcatcatgttggaattcgatcacaccattttcaaacaatgttaacatagtccagcttttgtttttctcatctcttctgagaggagactcactgtttctgtctgaggaagctcataccctcggcaaaacatcaggacaaataaagagaaatgggggtacgcattcccaacagaagcagtgtgttatttgttttaaaactctgaacagagatcttggaaatctttcaaaaagaccattgaattcttcattggctgagaacgacgttttaaaatgtcttaaataaggctttgtttgcattgtttgagttcaaggggccttattattgaatggaattgcacaagcctttctttgtgcaatcaaaccattgttattggtagttctgtaaaggaaactgtggaatcgaattggcagtggagtcataaatctatttactgagtgtggcttccaagaaatgttgcaattcaaaatgcactaagtctgtgatttattggagatttggagattctaaataatatttttaaaaaacttccatgcaacttctggtttaatgtttggcaactccacatgataaaaaaataaaaacagcccaaccgagtttcggaattaagtattcttctagtaagtgattcaaacttgtaatatttgccacaggactgacttatttatttactagctagaagctcttaagttcacttgtttatcagggcatatacagaagggtttgttaaaactcgatgttaactttacaactttctgacctggtgcatgaattctcaagtactgtatttcactgtgttggtgtgtctgatggaaatttcgaggtggtcccacaaaaatattttatgtagtgtgccttcaaagagaaccatttatttctcttcacttatcgtcccacaaagtcacatttggtggtggtcagccaagtcgcatctggtctagttttactcttgtcccaattttaaagagaaatgggaatgagtttgccctggtgagacccataccattgcaatgattatcttgagcacttaaagtccagtgttggctgttagtgtatttgatattctgcctgtctcctcatggttgaaatatgtctgaagaatagcagcataatctcttggctgtttatacttttttaaactttcctgtgttgtaaatattgtatacttttggtgattccagctatgtaacctctatgctctgtaaggtgattatttgtatatagcaacatggcccagtgatattatatagtttcccaatggagaggttattgagtaacctttgcattagtttaaacactaccagaagaatgctgagccaactataaacactcaattttgtatgttttccaaattgtacttattactgcttttgatactgtattacgtgccaatagtttcccaatcacatagcaggcaagagatattttgtactttttgatccactgtaatatttaataaaaaatgttactatctgtttcaaaaaaaaaaaaaaaaagggcggccg

SEQ ID NO: 886 - DNA, 74822 bp, Homo sapiens
  Genbank Accession No. AL049798
gatccctttaccattatgtaatgcccttcgttgtcttttttgatctttgctggtttaaagtctgttttgtcagaaactaggattgcaacccctgctctttttttgctttccatttgcttggtaaattttcctccatccttttattgtgaacttatgtgtgtctttgcatctgagatgggtctcctgaatacagcacaccagcgggtcttgactctttatccagtttgccagtctgtgtttttaattgaggcatttagtccatttacatttaaggttaattttattatgtgtgaatttgatcctgtcatcatgatgctatctggttattttgcacagtagttgatgcagtttcttcatagtgtctttggtctttacagtttggtgtatttttacagtggctggcaccagtttttttttttgtttgttttgttttttttttccatatttagtgcttctttcaggagctgttgccaggcaggcctggtggtgatgaaatccctcaatatttgcttgtctgagaaggattttatttctccttcacttatgaagctttgtttagctggatatgaaagtctgggttgaagattcttgtctttaagaatgttgaatatcagacccaagtctcttctggcatgtagggtttctgctgagggatccattgttagtctgatgggcttcactttatagatgacctggcctttctctctggatgccttgatattttttccttcatttcgaccttggagaatctgatgattatgtttcttgaggttgatcttctcatggagtatcttagtggtgtcctctgttatttcctgaatttgaatgttgacctgtcttgctatgttggagaagttttcctgcataatatcctgaagtgtgtttttcagcttggttccattctccccgtctctttcaggtactcaaatcaatcataggtttggtcgttttacatagtcccatgtttctgagaagttttgttttttctttttcaatcttttttctctaatcttgtctgcctgccttatctcagcaagatggtcttcaaactctgatattctttcttctgcttgattgatttggctattgatacttgtgtatgcttcacaaagttcagctccatctggtcacttatgtccctctctaaactggttattctacttagcagctcctctaaccttttatcaaggttcttagcttctttgcattgggttagaacatgctcctttagttcagcagaatttgttgttacccaccttctgaaacctgcttctgtcaatccttccatctcatcctccatccagttctgcacccttgctggagaactgttgttaacatttggagaagatggactctggccttttgagttttcagcattttttcattgattctttctcatcttcatgagtttgtccagttttgatctttgaggctgctgaccattggatgaggttttgtgaagacttttttgtttttctttcaatgctcgggttcctcttctgcagggctgctgtggtttgctgggggttcacttcaggccctattcacgtggtttgctcctgcgcccggagctgtcactcaaggaggctggagaacagcaaagatggatgcctgctccttccttttgcatctctgacctcgaggggtaccaacctgataccagtagaaacgctcctgtatagggtgtctgacaacgcctgttggagggtctcacccagttgggtggtatagggagtaggacccatttaaggaagcactttggctattccttggtggggtggatgtgccgtgctgggggaatcccacttgtctgggctgcccagattcctcagaactaacaggaggaaaggctatgtctgctggtctgtagagactatggccacccctccccctatgggttcaagcccagggagatcagagcccctggctggagttgttggagttcctgcagagaggccccacccagtgagggatgggtcagagtcagcacactctggctgcagtctgccacagccagtgtgttgggctttggggattagtcttgggccaagccctctagccaccctggctccagcaggggaaaagcgcagcctggagctatagagatggctgttgcccttccttttccttgggagcttagtgtgttaggcagctagcagtcccagtgttggctgccacctctcccctaagagttcagacagcttagacaacaggcagctgcccctccccctgggaactctgtaggcttaagcagattctagctgagtggctgttgagaatctacatggctccctggttagtaccctaggccccagtggtgtgggctcacaagtggggacttcctatccgatctatggattgcacagttccatggaaaaagcacagtttcccaggctgggtagcatgctcactcactgtctcctttggctgggggttgggggctcccatgccccatgtggctctcaggtgagccattgtaccatattgttcttcctttctctctgtgggtcatgccagctgcctagtcagtcctgatgatggaacttggatacctggattgctggtgctagattcacacactgttttggttattttcgatgggagcctccaatcaccactgcttctagttggtcatcttcgccccacatccccggaagattctctttgaatagtgattcagattaatagttcaagacacatttatggtctcataggaaagtggagaattctgtagacatttaatgtatgtgatgcttaaataatagcagtgacaatgcattcagtaacttaataaaaattaaaaaaagtaaactatagggtattatgtaagagtacagagatatgaaggaagccagaagagtctaataaatgtttgtcatcaaaataaattttattaaaaactctaatagccaaaatgcaatttttatgaggggatagagccatttacaaacagggattcagtgtgttaaatataacactgaaggaatgaggtaatattaagcttggctaagactgttttttttttccactcttgagcagtttaaccattgtgcttaagttgttcagttaaataagtcagatatattgtttgtttcttcattgccctgattggttgcctgatgaaacagttcagtcacaatggctgagttatggctgaattgaaggtgcccataaatacagactagagaggattatgtacttttcaaattggaagacacattatagattgcctagtccaatacatgtaaccaaatctgcctaacagagctagtctataaaatctcattttggcgggaacttggaaggacgaaggatacttttttggaaaatctgacatttgcctcttgcatggtactgaaaagagcttggattgaggagtcagaagacttgagtttaagtcttagttctatttcatatagcaatgtaaacttgggcaggtcacaaggtttggatgcctaccccctcaatggtaagatgggggcagtagtaccaccacacaggcctgtagaagaactgtacagttgttcattgtgtttgtgtttattagtaataatcatgtgtagaacacatttgactggaggcagtttgtatttataggctatctcttattgctcatgggtgtccctttattttcactaaataagttgtgaaatgcctaagtgttagaaatctgttattttattattccctattgcaacaaatatggtgctgtccccacaagatgattttacttcgtactgttgaccaattgactgaatctttgcctaatcataggagacatcgagtggtggctaccaatgagagagaacatgtaatggaatgtcattagctgctgtgtattctaccagtaaatgcactcatgttaatgttatgtatcattagttttgaaaatgtgtactagaagctttttgctttatgaaattagctgaatttatgaagataatttgcatttttattttaaacataccttttatgataagattttgatttgaaccaaagtatattcacaaaatattgttctcagttgaagaactttaatgagaaatgtacgtcctgtatcattctgtcatacatttagcttattgtctgctggaagacctgatctttgtccaaaagtttgctttcctttgcaacacattgtgctatttttcatgccaactcattattctgcctatcattagatactattaattcaatacccataaatgagcacctactatgggtcagaaactgtgctgtctaccaaggatttagagagaaatataatacaatccttgtcctcaaggaatttactgtctggccatgggaacataattttcataaagtcaccataaagcattatggcaaaggcagtgatggtgttctgtacacagtattttaagattcctgtatttcctccctgtctcctaaccagccagagagggatcaaggaaggcagggagtgaggagatgagagacagaggacactactccatggaggacattaatgcctttttaagaagttgagtttaaacccatctactatgaggaacatggcaagtgtaagcattggagtcaaagatttccatgttagatcactctggcatttgtgtgtaagtggaatttgaaggggacagcaagaacaaagacagctacattaggtagaaagccattgcagtagtctggaatagagatgatgagttctacttgtggttattttccatggaactgtagactgcctagtgtcagaagactctcctttcattctttaaatatttatatagttaatagttaatgaacacctaccatatgctgggcactgggtatgaagagacaatgagaacatttagttactgtgaaaatagaaaaaaatgcagaaatgtgacaagtgctatgacgtaggtataatcaggtatatggcagcaccagtgaggaactattaactcaccttggaaaccaggaaacacaccactgaaagtcctccagggaaagaaggtacaggtacagaggcatccaagcatgggaaattgtatgtgaacaggcacagaggcatagggacacatggtctcttcagggaaacgtgactaattctgcatatctggagcacaggaacctggcggtgtgtgtgaagggtgctatgccactgaaagactatgtggtttgcttggaaagtgtttaggaaaaattttaagtggggatacaacctattggatttatgttttggaaaaatctccctccagcaattaaatggacttcctaaagaaaagcatagaccaaaggagacaggaaagcaaggataaggatctgaataaaggagacagttggagaatagatgaaagggctcaaattcaagaattacttaggaggtgaaaattattctagagattccacaggactcagagcctatgtgaatgcatgaccaagaggactgcagggaaagccagggttcagttaaggtgaggaggtcaggcatgagtctatgaaaaaatggaatatgtgtggtcatactttttcatttttttagagccatggggtataagttctaaggtcacagatagtgtaaatgtttggggatatgggaatgaaagcaacagtgaaagaatatggattgaaagactacgaatgaagagtctgggggaagaacaggtgaatgaagggactgccacttagagcatctaccaagaataatcaactaagtcattcattcactccaaaaatgttcacttagtgagtttattccattcatatgttgtatatatatttatattttatttatttattatttattgggtttatttatttataacaaacatatatttgtgactgagcatcaacaatgtactaggtactctgtgaggtactggggatacagtcatgaaccatgtgtaccaggaaaggacctactagactcaatgtttgaagttagctttcatgttaagttgacgtggtgttcatgctggctgagccctaggtggtgagagaaaacacgccaggagcggctgttactcctataggaggcagcatggcacagtctatattggagtctcaggagagcacagaatatcctggaatgcacaggctctggactcatccaggcctgagtctgagttctgcttcagtgtgtactgttatgtccctgagaaaggaattcaatccctctgtgtcagtcttatcctttgtaaaataaggataatgatagccactttggaaatctacttgagtattcatatgaggtgcatataaaggttaagtaaagagcgtggctcagagtatgcacaaaaataattaattgtagtcatcattattatttggtatatatatttagagccataggagaatcaaagacctggatcttcaggagatagagacctgctctgaaggcactgaagccagtgtggactgaagttgcacgtaacatcaaagacagctctgttggtggccatagagattggcttcctgtggaaggaccttaaggttgcagctactggaaatttgcttacctttctacactttttattttttaataagtgagagctttacattgtctaatagagctgaaccacattatttcacttccttagattaagtgtccaaattcctttacaggcaattaaagctaatgaaaaataatttatgtgtctagaatctgttataactatcagatctcagtgattaatttggtttatgatgcagaaaacctgcacagtctaagataaaattgaaaaagagcaacatgaggtgaggtgagctagaactgtgatatcagcccaacacattttgctaacagaccgagtatgctggagtttaatcaactgaagagaacagtgatgcttattgagtgtgctaattctctaggcagaaagcttcccagagcacacacagcaaagataaacaaggccatgactcggtgtggagagcctgcacaattgtggaggctgaaggatcaaacaaagacaattatgatctcggttgtcacagcaattctgtttatttgggttagattgagtttatggagggtttgttatttaggagtcattttagaaggcagactagagttattattactacaggagatgttgaacctgtgtctgattttattatagtgggtaatgtttacagtaatataaaacagtcgagtagcaacattattattttcagacaactcatctggtgttctaacttccaacaacgtcctcctgaccaccttacagtgccatctctccctccagaggcaatgtttaaaatactggaataaatctttgaatcattttttaaaattggacattattcaactatttcaaattgaacattatttaaaaagcagagtttaaagcagttatctctccttactcccagtggaaacccttgactccaagttgacatagctgagatgactgggctttgtaaacagctagacttcagttcaacatccatttccactagctgtgtgaccttgggcaagtcacctattattttggggacctttgaacctatctataaaatggcagtaactatgccagtctagggtatctgcgagtagcaaatgggaaagcctgtttgagcatagagtgcaagagcctgcaatgcatgttctctccctctctcttcgcctcactaaaccactcactggacagggacctgacagaggatataaccaagctcagatcccagaggcttgaattctaagtgtccccaacatttactcataggtgtccttgggcaattcatttgcctcactgggctccagcctgagaattgggttcaggagacccaaggtttttcttggcttcttgaggagcctcctcacttccataggtttgctcaggcagtctctgctgctggcataagtcttcttcatcttctacctgtcctaatgccttctgtttctccagctcatagtgatcctttgctctctgcaatagcataaggttttctttgtgtattactcactgggtgtgggattgtgagcagccttcttttattcattaacctttccagttttttgttcttttctccctctctagaataaaaaatctctctgaggaaaggcatgtgttttatgcttcttggctttcttcagtttgtaccaggagcaaggaagctgattaatggcaccttgttgaagtagcgatcaaccttatgtgtacaaaagcatagccatgtgacattatccatttagaacaagccaaagtgccgttctggaaagcactgagtgtcgccgccctgcccaacacaatccacttgtccacctctttccgttttttctcctcctctgcagggacctgggaattttctcgaggcttacctatgcatgaagagaactaagagcctgccttcactctgtgaatttctgtggactgaagtccttctccaagttgagctgtgcagttcataccatgacagattttccatttcttcctcccagaagcctattggcagaaccagtctgcatactacactgttgtggtaggcggcagacagatgtgactcagagcatgtttgatttcccagaacatatttccaagggggtaatggctaatgagttcacctttgagtctgccaacaaaagaggcccacagagacacccaggtcagctgaaatctaccagacacagagaagacagattccagacaccagcagggtctacgaatgcctgctagacagccatataaaaagaaagctacctaattctgaaaaaccagcttcactgcattggtccatctaatcatgaggtgatcccacaggtacactttcagtgggagtaacaagaaaaagaaaaggctataaggtctatgttaatgaagtcataatctgcattagggtctgtcttagggctctacttttattttttcattaaatatttgttgaatttctaccatgggtcagtccctattctaggtgcgggggatatatcagacaaaaatccccgcccaccccacccctagaactcatatgcttatatgagacttaaaaacagcatccaaattttcacaggtttacactattttaccaacctgagcccctttgcctcttggtcccccagtctcccaaggagttattcagtgagactttccctcatttctgccaagtgcctagtactgtgctagctgctcacgtgttgattttgatacagttcacagttcataaaaacaccaaaattgttatgttacccaggatggtaaaatacactttctgaatgtgtaagtgatcattgtgatcgtatgttatactttccaactcacttatcattagtgaatagctcttaaagggattaaatgaatgattacccaataatgatgaataaagagagtaagagtggtattaacctccatcagaaccacagtaccatcataataccttgcctgttaatagaatttcataattttcaaagtgttttttcagtttttggttgcttagagtgttgatcgatctattgaaaccaaccagaaatccagattagtttaaaaatacatgtcttggatgcccattatgtgtgaaacacttagctaggcatgggaaatttaccaatgaacaaacggaaatgagactcctgtcctcagggacatgaagataaagacacagaatgctgagggagtgaagagccccagtcttggaaggctaagggaagtttcctggggaagctgaatttatacttggccctgaagtaggacttccatgcgtggaagacgtggggagaagatttccagcttctgctgtaaatgttagtttcacattggccttatgacaggctgcacatctgttccattgtctctggggatggttagagaccttggaaagagcaggtaattctgcatattaaattataacccattaggcggccggttagatgaaagggcctggcttcataatctctttctttccatgaagtaaccatatggtcacctttcagctgaaacattgtcctaggactgaactgcctggaagccggtgactttttttgttttataagattaaaattacttttcttttttgattataaatacaatcaatgataattatttttataagttggggaaggcagaaaagtatatagaagaacaaaggaataaaaaatgctacaatgcaaattcataatttgcattttgcaatatttctattgagcatttttcactgatacagtcattcattcacatttataactgggcttcttatggataaataggcctgcattggtgtgagaggaagaagaaggtcacacaaaggtagattcaagtgcttagcaagacacagtggcatctaatgaataggttttaaaattaatagggatttttggttggttttgactttttagaaatatttcattctatgaaaaattgagatatgggtgggatatgaaaatctgagatatgcatgaatatgttattatttcttaccataaattttaaggtacgtgtgttttttaattcttgctttataaaggaatgcatttaataacagagattcaacaagttagtaggaaagggatgctatgcccaagtatgtctaggcaacattttgtcaagggttctgcctatccagtctcaccaattctggatctcaggatggtaaccaggttcagatagcactgcttaataatgtggttcgattaaacagaagtggtttaattaaaactgactgagactttaaaaggagagtggatgctattgactatgtgatctctgttctattggccaccgtgatgtgcacaactgtttggtcatggactatgttgagaaacattttctctgattaataagagaagaaccaagtaggcttggagctagctgggggaccagctagagagatggaaatccttgatttcccggtgaacaagaacatttataaagacagaaatatgcagaatctgttgttgttgttgtttttgagtttgtggggactaaatcccagatctgtttaagcatttgtgagcactaatgcttttgtgagaatgaatttttctgaaggaacttacaaaagtgttgagtttcatgtttgggttaaagcaatcaagcatgaagacatatatatggatgaagggccaggatggagagagaacttctccaggccatctgagttccagatagatagaataagttactactaacatgaccaaattgtggaatgccttatggtactgatgtgagaaaccaatctctctttagagcaatatgactgtatgttggacctcccaggcccccttggtaaggccagtatttcctggagaacctttctcaaatgcataccttattttttgccttccataatatcatttccattgccttaaattctaccatcccctttcctatcctgacctctcaccgccttctattgaaatgccgcctgcccttgacttatcaaactgtactgtcacggtttgtttgcttgactaactcctttagtttataattctccagaatgcaggaactgtgcctagtaaaatggttggtatataataaacacttgataatttattgattcagttactgagcaaatgtaagtgggacttaagtttgcttgataaatgtttcctattattgacgtttactaaaatccggcttacctaaggaattttatttccaatatatactgacactgttttccttctctgactacatttattgggtacttattatatgcaagacactatgtgatctcatttaattcttacagtaaccctgtgttgtaagtactatatttctacaggtaaggaaatagagtctcaggaaaggtaggtgacgtggccaaggtcataaagctgggaagtgacaggaccatgatttgtgtccaggaagtctgacgccagagcttacagtcttttctactcacctcagaagtcctacttgtccttcagggccaagcatagactcggcttcctcaggaaactttcttgcagttattgtcatcatctatcttctcatctcaccattaggctgaaggccttgtgaggcaggaatcatgtatctcctctttctattatctcattgtatgtggccagcatcttgtaaagttgtttagaaaggaattcctacctgtactgggcagatgaggggaagggggcttggggatttctctaatcttacacagccaccctctgtcagagccagcggtaggccctaggttatcatctttagttccaggctcctttcctggaagaaaatgccttagaaaatccctttataaacaattcaggaggtgatagagttcagagattcttagaattgcgagaaaccacaatggttacctagataaatgtcctcattttaaacagtaggcctagaaaggagaggtgacttatccaagactgtggagcaagttagtagaaagtttggagtaatgaaaaaacagagaacaaaacttgcagttaccagatctgggatttagtattcactctgacacttagttcttattgaaagacctataacataaagtataattattcagattcaaaccaagttgacaatgtcttttctgtcattgtccttggcctatctacgtgcaaataatagttttcttcttagtagaaactccttttattccacttggcacaggcactatttattgaattgctttaaagaagttttttttcttgacttatgtcctcttgcagtctcctggctactcccagctgcagcctctcctcccccagccatgctccctgcaccctcccagctccccatcctctcaccagccatttgctttcttcatggatgccaagtcagccaatcagcattgcttgtctcctttcctgctgtgctccacatacccaactaaggctatttcctggtttccatcctgaaccaggctgaaattgctaaaatattaatggctccctttgtgaaaaataacaccgaagcatcttattataaattaaaattgccagagagtcagaaacaatgacatggaggaaataaagcaaagctctaatatgaaaaagtgttttaggagttaaggcaggagaagatatccttagccctgccttccccatcacaatgctgggatcttgccgtgggaaataccatcaccactggctgagagtcaccttcttgaccacctagagggggtgtatggcaaggtacgcgatccctgtggttttgcctggctggctcttcttctgggtccactgggagagaggatgagggaagagcagcatggatcagaaaaaaaaaaaaaaggcaatctgctgtggataaagaaaagagggacttcctgtggttaaaaattcatgtgacatcttgggatgaggaaggttgaaggatgctgagaaaagattaggctgaactcaaaggccaagaaatgtgattccttcctttgtttaatcttaagtaaagcatttagcactttatgtcttaaatatctgattcccccaccacactctgtcattgtcatcattttattcctggggtctgcatggtgcttggcacaaaccacaatgctaaccaggattttcagaatgaatggataaataatcagcaagggaaagagtagagagcaaaaactgaccctgaatattttcagcatagtgaacgttaatatttttatttcttttgtaatgaagagtacaaatggttgggagcaggacatcacaggaggaggaaagatagcgccatctctgcagaagaactcctgagccacacacagaaggaaagttgatccccagggcagcctttcccaccaaaaaaatcaggcccaatccaggagagtttgccagtagctccccagggttccagggtgtctgccagccttcctaggaatcgtgggcaggcttctaggtgccagtgactcaaactcctttttccacttcccagttcaacctggtcactctcatccccacaagttcccaatctgaatcccattctctgaccattctctgcttccttgtttttaatctcatttgagagtgatcctcacgggttcccctggcccctgcactcattttccttactgggtatgctaacgtttgtcttctaattcaggaaatccttccaaccctgttttcagctctgcctccaaacccttccatttccccatttcacctcccagtctcctcactcctggagcaaagagctctgcacttggattgctaagcatgcatggctcatgtggagcaggggagtgggaagatgtccctcagggcagaaagcctgcttttggtggggaacctacgtatcattcaaacaggcttagctgtagagaaccttcactgcacctctcctccagttctgcctctcccctccactatgctgaacttgcagttcattctgcagtaaaaagcagtagccaggctgcagctggtgctccagaagcccggctgtaagcatgcgcactgtatatgtggtgtgcaaggaagccatcatcagtcatataaagcagttgctatgaaacatgtgaaaagtgagaaacatggtttaattgtggattttattagaagtgtgatactagtcagaaaggcccaggaagttggcattgcagttaccagctcagggagaaggaaagagagcagcagaaacttctataggagatccaactgatgttaacatatgtggacaccctcctgtccccggcccctttcctttcacccagatttggtatgtggcaaatctaaacatttgcaaattcacagtcgtattcagtcatccggcacattatgaacttccactggcgatccctgtgggagggagagtcagaaaatgaatgtcagtgagaaaggacatggcaggaagaatcgctgctggggaaacagcagcagagaacatttggaggatctgggaactgaagggacacttaatctcactttgctcttagaagacatctttatgcagtttcccaagaaccgacaaatctgtgagttcaggtcacccttgaaggtgactaattaggtcactggctgtgtggaggcctctgttcatcactggtggtcagctcacccctgctgcctccagaaagtacctcaaggacctgtgggttaacagcttggaataaaagcatttatttaacatcatctccatttcattgtaaagaatcttgttttaggctgggcttggtagctaacacctgcaatcctagcattttgggaggctgaggcaggtggattgcttgaggctaggagtttgagaccagtctggccaatatgtggaaaccctgactccacaaaaaaatacaaaaaattagctgggtgtggtggtgcatgcctgtagtcccagctacttgggaggctgaggtgggaggattgctggagtccgggaggttgaagctgcagtgaaccgagatggtgccactgcactccagcctgggtgacagagtgaaaccctgtctcaaaaaaaagaaaaaaatcttgttttaaaaagtccgtccattttcccactgactctttctgagcacttaacatatgctgagtgctcaccatgcactgggctctgtgctatacatgtgtttcccttcagaaaacactgctacagaggaatgaaaaagtcccttaaattaaaaaagaaaatggctgccattctggcatcacaagaattgttatgaattgcctatgtgtttaagtggttggggatgggaagagtgtacatagcattactaaattttgaaaaatgtggtgtggatacatttcaaggaatgttctttgctcagggtgaatttatgttctttattcatccatttaagagaaatgttttgagtgcctacattgcatgacactcctgtggtctaatactgttgaacagtgataatgataattgtagcctctaatatatctggcattgcaccagatgctttacgtgttttctcttttaatcctcacaacgattcattgtttaggtgaaaaaccaggctcagagaaataattaacttgctttaaggtaatacaagtaataggtgacaatttcagattcgcagtttattgtactcaaatcttggtctttctcttaaaccacacagtctgcctaactaggtaatcttaagcccagaagaacacgtggctgccatgccctttgcacagtcctgataaagggcaaaaacgaagagtttttccatatttaattatgcaaatcattccaaagcttggtggggtcctttacaaactcagaattatctatctcccttttcaatctgcaagccctcttttcaacaatttatcctaaacactatgactaacaaggcctccatccagcttctaaactgaaaagtggggctgattgctcttagtcctaggaagcagggctcactctgctcaaacagcctaaggcaggctttctaattctgagtctgttgctccgggtcgtttgtttagaacaattgggtatagagtccctcaacacaaatctgggtgatcaacttgagggtctgggtgataccagggcctgggtgatattttgattcctgcaattgtcaaaagaggtcatagattgttttagaaggaaattagaaaattggtggcctgtgggtttaccaaatgtctgtaattactgcagccaggtcttatttatctgtgtagcaacaaacacagataaacaagatcttatgatcaggcattcaaactactcttttagaaggctattaattgatgctgagcaaaacttagacttggtcttatgaagaccaaatgattccaccaggttcagtctctgatttcacaccaggacagtgggggcaaatttgctccccaagggaatacttggcaatgtctgcaacttcttttggttagggtggggtgctaatggcatctagtgggtagactaaacatctagaatgcaaaggacagaccctgaaacaaagaaatatctggccctagatgtcaatagcgcatagatggaacaacagcattctaagaggaaaccactatgatttgcatgtggagggaaagctcttgcacaaggagtcctgccctgacaatagttctccaagctggggacctcagcatctttcagcagaggagaagaaacccaagttgtggatcattaagctacttatttttgatgacagtagcaaagttgcatgagtatatttattttattttattttggggggaggatactcattttaaattaatgcaatgacataatatttcagtttttcatgattctgggtaatccacataaccgaaaaatttactaaaaagtgaatttactgaaaactgaattgagcattttaactactcagatatatttatttcatactaatcttggatggcactcttcctttactgtattaattcctgctttcttaaacagggaacatagaactaattttcttgttgagctgaagtcatcatttggagcattgagcacccctgttatttcgttttgcactttggggagcatggccctgctaaatgacaacccatgttctttgagttcttgagcctttcattttctttatttttcttaagcatatttgttatcatgtcatccagctatttattctcattggtggaatgagtttcattctaagtagtatatactcgtttccctttctaatttgctgcttctagaaaattggtaactaagctagtttaaagtgtatctaaagtaaaaataagtaatgtgtgcaaactgagtggtttgcctatgggtaaacataaaggtttttgctgatcagcctgcaacatatattgtgcctttccagagctacttaatgtctttttttttttttaaaaaaaaaaagaaattctaggtcatattaaataagttcactttatttaagatgtaattctgtttgaaaacacagacacacaccaaagatgtgtcacactcaaattcatcatagcatactatctaatgagttaatgtaagtgttatttggtttgcaaaatatttattggtaacttttcaggaattcatttctgtgtaaagtgattatcggctgactaaaagtaggccaaaccaatcattaacacctgaatttacccacacatttctctatattaatagggagtacaattcttgttttcttcttaccgttttgatgtatttgagataggattaaggagttgattgtgagagaaaggtgatgaaaaaagtgttagtgctgtttttatctttaggccatttaaattctcttctttcattaatttttgcaggtttactgagggattgttaactcctttcatttctaaatatggttggtagatgctatggtctgaatgttggtgtccccttaaaatttatatattggaacctaatactcaatgtgatagtattaggaggaggagcctttaggggggtgattaagccatgagggctctgctctcatgaatgggattagtgcccatataaaataagttgaagggagctggcttgccctttccaccatgcgtgaggacacagtaataaagcaacatctctgaagcagcgagcaacccctcaccagacactgaacctgctggcaccttgatcttggactttccagcttccagaactgtgaaaataaatttctattgttcgtaagttacccagtctaaggtaatgtggtatagcagcccagactaagacagtaggttctgtgtgtttcttatctccaatcccttttctttctcttctctcttctttcctaaaacccaaagtggggatgatatagaggcacggggtggaagggggtccattttgacaatgggcactcctctaagcatatttgccttctcctcttggtgtttcatgaggaaaagtgctctttgaaattgagtgaggggaaaagcttagaccatcaagggataccgagtttaggactctctgctcttgagcaggctggaatccaccctcacttgcaaggtgagcagctccatgaggtgagctcatgagaacagctcacttcccactgcctcccattttccagccaaaactgcagttaatccttgaccaggtaggaaactaagataagtaaaacctcaggtcaaagttcctgcagaaatatatgtgcatgtaagaaattttcacttgtattctacgtgtgtgtgtgtgtgtgggtgtgtgtgtgtgtgtgtgtttataaattcctgcaggtaaaatccttgcagggagttagtcccaactcctttaaccctagcccattgggaaggggctgtctttctcacctttccactgcagagaaagtggttgttgctcctcggatatagtaatcataattgtaggaaatcatgtccatttcctcaccatagtgacctggatattctgttgttagcctatgcaggaagaacaaaggttagaggaaaatgaaacacattattattgctgggagcaaacagaagacacactatgaagaagagatggagtttgagcatcctggcaaatccagactgaagttaaatgacatccaccaaacaactccaggctgtgaagaaacagacagctctcctcccacttctcatcttccttttctaggccattaaactgtgcactgaaaaagatgaagatacctccccaggctttggaattatcaaaataactttggaattcttgatattgattaatatcaatactattcctattctattcaagtcaactaagacaatgttttcaaattttagattatgattcattagttgataacaaaatcaatttaattggctttaaaagagacataaaatagaaaagaaaatataaaagcatgcatcacatgcagtaaggacgagtctatgtatgtaaacattttgtttcaaatatatatgtgtgtttgtttataagatgtacatattgcgatagtttaatgtttcttattgtgagttatagtcaacaaagtgttcaaaaattatttaattaaaatgtaagctccccaaaggtagagtttttgccttgtccaccattgttcatccagcacctaaaacacatacataataaatattagctgaataaatatatggcctggggaaagtcaatgaatctgttttctgatctgtagaagaataaagtctaccttataggtttgtcattggaactaataaaaatgagtgatgagtgtgctatactagtacatggtaggtgttgaatcactaagaactattttgtttcttcttcctcttcctcctttcctttccttctcttccaatattgagtaaatcctgagccttcatatgagtaggtccatggtagtccatcctggaataaagtctagaatcccccagttctcataagggctttgccactggaaccttcaggaccaaaacagtccttttaccatgaaatagctcctccaaagtctttatccacaccccagggacgcttggaaaacaactagtttgtgagtgtcaataatttcatctgatttgggtttaccagatcactgtttattaatgctagaaagatcttctcctctgcagactgatggtgatctttctccaagattgtcattaaatcatgaaaagattgatttataaactgtaagggctcctaggaggatctcagtgcacagatggagaaagatcaatggttagctcattctcttggttcataatcattccttttacccattattcactaacccttgttctctgatttgacttttcctaagacgtaattatgctctatcaggatgccaagtccaacccaaagtgaggtacctgtgtttttgcttaacgagttcatgaagggaaataaggtcctgcaaatccagaaacttattttgtgcttctaaagagatccagaagcaggactttacctttcaggtaaatgtctttttttttttttttttgagaccaagtctcactctgtcacccaggctgttgcacactggtgcaatctcggctcactgcaacttccgcctcctgggttcaagtgattctcctgcctcagtgtcccaggtagctgggattacaggtgtgtgccaccacacccagctaatttttgtatttttaatagggacggggtttcaccatgttggccaggctggtctggaactcctgaccttaagtgatccacccgcctcagcctcccaaagtgccgggattacatgtatgagccactgcgcccagcatggtaaatgtcttataagtagaactaatagggccttacttggatcccactgatttatgatccatgagaattctaacaaggactgtattaaagttaacccaaggaaagagaggtttgttgagaacatcaataatgcaaattagaataagaggttgcatgggggtgggagggggtgtgtgttttccttacttcagggaacaaaaaatattttctaaaacttttgaagcatctctggatacaatgtgtaaaaattaattaccaagttgtgtgttttttcttttttttgctaaggcagaatctacatacagcaacactgcattaagctaaatccaattgccaaaagtatttggaaattatgaagctagatttttattttttaagtttttactgaccactctgatctgtcttcagatacttggataaatatcacggaataaagtgggaaagaaaagcttacctttaaaaacatcaagaagttttaagcttcaaagaaggaaaatgttatttcatgctttctttaattaggattctctgttgcttcatttttggtagtgaccagacataagccccctgtctaactggacagtttgtccgagaagcctctccatgaggtactgatgtccagtgaatttctagaatgtcctagagaaggtgaggtgcatgaccattggtactttttcttcttggtcccagacaggttttgttttgtgtgacttttggttgttgttattttgtcttgtttttgttataacaccatgggattgagtttagactgtcctagagaaacctgggtaaaggaggagagggaaggaggttggatatcgatggaaatctctcctactttatgaaataaaaataccaagggagaaatgacccaaatcactggtagaaagtgaacctcccaaacaccatccataggaagaactattgagtcaatgtggcccaggatgctgtgttctgtattttcaaaccagatatatgtggctgcatttagcgcttgatgacactgcatgtgcacgcgcacacacacacacgcgcacaaagtgtcctaataagtgaaagcccagtaatagctccttagagagaaaaaagaatttaaacgttcagaactagacactgagacagggcatagggacttttcaggaaattaaaagaggctacaaggaagcagaatgatcagggtttcctaagctgtgacactgggctttgcgagtgtaggtcggggaagagttcggtgtggttgcagcttccttgtgaattccttgtgaattactaggtcactttaagcagttttttggaaaaacacacttcatactgagcattgccatacattcctagaccaattaaaacaatcaaacaaaccttcagcttggcaagatgaagaagagcgcaggtcaggaagatgcctttattgaaatgagtctacttttcaaacatttctatgggaagccttattttctcctttcccctaaagtaaagtgtttgaatagatttattcaattttagctattacttaatttttaataaaaactactgctgtgcaggagaatggcgtgaacccgggaggcggagcttgcagtgagctgagatcgcgccactgcactccagcccgggcgacagagcgagactccgtctcaaacaacaacaacaacaaaaaaagcaaaactactggtgtgtgtgtggggtgtgtgtgtgtgtgtgcatgcgcactttcagatgaatgactcttgtggtacagtttctcacttcacagcactttttctgctgtcaagatgaaagacagagagttgttccaaagctaagaaaaaacttgataacataaagccacttgcacaactcttgtgtcagctgaagctgatggtaaaaaaattaataatattttacttatgagctgagggaaatcagttcgaactgaagacaattttaagattgatataggatttttctcatctaagattcttgaagctctaaaattattaacagatccaactggactcaatgaatgtttgctatgatacaatatcatagactgagctgctgctgatagatgtctcggctccgttgccacaagaacagacatattgcagagctgagtccaggtatacgctctcacatccattttagaaagggaaatagagatacaatctagttatatacagtggccaattttattcattgtcagaggttgggttgagaacttattaggtttttaatagttaaagtaaagattttcaatctattccttgacataaagtgactcagcgtaaggttttgtgaaaacccacctctacgagaccttattcggagctagacacttttcttctatgaaagtcaaacttcatagcactgagatgtgtttgttacagctgtttcacttggggaaattagggcaactggattagtcggtgtcacctggaagctcctctttcaggactttccctccaattgatgtgcacatgaacagatacagcttcatctcatggtcaggaaacatcatatccccaaccttggcccactttgtggggacaccagaaaagcacacaccacagactccctaccataaaaactggaaaaaaaccccagcatttacatatgaacagatcagaacgggtacctgaggaagccatacttcagctttttaaaaaataagaataaaattagaatgtcttccaaatgatcttttatagcccagcttatgctcaaacaacattttagagaagcttctgttggtcattcaatattgaattctgtttttcttctatttctctaccactcaattagcacattactttaaatatcccattcaaatgtcctgtgacatgtcagctgatacagtttggctgtgtctcacccaaatctcattttgaattctcagatgttgtgagagggatccagtgggaggtaattgaacctttgggcaggtctttcctgtgttgttctcatactagtgaataagtcacatgagagctgatggttttaaaaatgagagtttccctgcacaagctctctttctgcctgctgccatccacataagatgtggcttgctcctccttgccttccaccatgattgtgaggcttcctcagccatggaactgtgagttctccattaaacctctttcttttgtaaattgcccagtctcgggtatgtctttatcagcaacatgaaaatggactaatacatcagcactatatatttagcaagataatagaatactgtataacatcatgatggccaatatagtgagctctttgagggatcactggtgcatggaatcaaatatgcttttatgatctggttcagaggtgggtttggaggagaaactcaacatttgcggatttggtgtgttgaggttggcttacgttttatatattcagctaaaaagatgtccctttctgacagtcaaatcattgagaagtttgttaaataaagccagtctgttcatgatcaatcctcttgcataatgcttttccaagtaagctataaggaatgaacatatttcagattaatttagtttgtctttattaggagctacatcagaccccctttgaattagttttgtaaagacagaaaaaataaaccccaaatggagttatgtgtaaaggaaaacagccacagagaacaatccccaggcttcttcccacaagagctggggattggccaagcgggacctctggtagtcacccaagtgcccttctctgcacagaaaatctgaacccaggggctctgaggtgtgtgaaataaaaacaaatgtccatgtctgtccttttatggcattttgggactttacatttcaaacatttcagacatgtatcacaacacgagggaataacagttccagggatatctgtagcttaaatgagtagaggaaagtccctgaacactttccaaattgctctcttggaactgagtttctaactcactgtccaagcccagggctagtcagtaagcacattcactttgactcgtgttgattttcattagccacattatgtggtggtcaccctgggcctgcatgtcagtgggggctacttgaccttcaacagctcccctccaattaaaatagttttattctctgttttctaccagatgcctactgtgctattatgtaatatttcacctgtagaagtcttattcctcatctagagacagctcagtactatgcaaagagcatgggatttggaggcagatagactggttgagtcaagtttggaactttgaagggagccacaacttctatagctcagttccctcatctgtatgatagtatcataatttttgtgtgtgaggattaaatgcagtaacacaggaacacgtggtaagtgtcaataaataaatattattattatcatcattatcattagtagggtctcacccaaagcctatgaattgttattatttcatatccattcacattcattgactgcttaagtgaattaataaatagaagtaagaatgattgcctctagaatctattatagtagagggaagcagactagatagaataaagcatcagatttggtttgtaactgagaggtttactttgttctaagtagctggccttgggttaaccaatacttagccagacacatctatgatatttctgcttttgaagtttgaacataaggagagaggtatcacctataatgcaggcaccaaatacagtcgatatggtttggctctgtgtccccaaccaaatgtcaccttgaattgtggtttccataatccccacatgtcatggaagagacccagtgggaagtaatttaatcaagaggacggtcactctcatgctgttctcatgatcgtgagtgagttctcacgagatctgatggttttataaggggcttttcccccttttgcttggcattttttcctgccatcatgtgaaggacatgtttgcttctccttctgccatggttgtaagtttcctgaggcctccccagccctgtggaactgtgagtcaattaaactgtttcctttgttaagttacccagtctcgggtatgtctttattagcagtgtgagaatggactaatacaacagtcatcagtggcatctgcaggggattgattccaggacccccatggataccaaaattttcagaaactcaagtccttgatctaaaatggtgtagcatttgcacataacctatgaatatcctcctgtttactttaaatcacctctagattacgtataatacctaagataatgcaaatgctatgtgagtagttattatactatatggttttgtatttgtatcattttttattgttgtattgttatttttatttttattgtttttttctgaatatttttgattcaaagttggttgaattcttggatagggaaccccagatatggagtgccaattgtacatgtctacattttaaatatggcacaataattatggaaaccattccagcagatgaaagggatgatagattttgctcaagttcagagaggctgctgtctgcacaatgagtgctatgtacatcatgcaatggaaggcaatggttttagtagggcgcagagcatctaaacccaatataagttcctttaaattgagacatctagtccaatttcctcaaaacttaagtatgtccatctctatagtaatagcttccagcttgcgcagaggaccagtatggaagctgctcttcatttttatttttttattttactttaagttctagggtacatgtgcacaatgtgcagtttgttacatatgtatacatgcgccaggttggtgtgctgcacctgttaactaacattaggagatatacctaatggaagctgctcttcttaccaggcctctgggagctgaattgcaggaggctgtctgggcacaggtggcatatgacaggcacagcaatgcagaggcctgtgagattgttcatgtccctaaaacagcattacaggagtgaacatgcaaacactccctatcttgtattaacatctgaacaaagaggctaagaattaaagattagctttgactgggtgctttggggtgggagagataagaatgttctaatcaactgatgttaactagagctatacaggaatttaaaaaaagcactctctggcttatgacttgcacacagagagtggggaagtaggcagtggagaatgcaaagtctgagagacagaatatcagggttgaagagaaaagtaaaggttacctaaatggatgcattattttacagtcaaaagatattatccaatgaacctaatgaaaggccatgggtctggagaagagccatttggaaaagaaaatgattcacaaccatcagatcctgggacacagagtctccgcctggacagtagacagtctggtgtgcagcctgcagctgctgagctgtttggagaagagagattatgacaaacaatgtctaaagggttgtggcaacttcagtgacatgtgtttgtggtttgcagaccactagactaagaattagaattttcatatctaaataaatatctataaaattcactattcatccaatccagtggagaccatttcctaatggcatgtccacatctctcaggaatttgctttcttgccagagtccagtgaggctgtaatatccaaagagaaaccgcacaagctgaaacgagagcagcaccttggttcccaccaaacaaataaatctcatactcatttgggagttggttggatgatttgttttttccagcccagagtgatgatatttctgaatccctaagtgctcacaaacgcaggcgctagatattcacttagctagttcatacggtgtcaggctgcgtgctgaagaatgcctttcaaagagggaaggggaaaaatgtcgttcccacccacatgggtccagttccctgggaggtaattcaagctaattaaagtcatgtaagggaaggtttcagataagagggttatcagcatttcactgtgggaaggtgcaggaaaaagagttctcacttcactctgtaaggctgttaaaaggatcaaataaaataatgtacatgaaagaagtctttgtcaactataaaacatcatcacatcaatgtcaggtttcaccattgttactgttcctaggggcttgcaacattcagttattcatctgacacatttattaagagtctattttgtgctgggtaatatcctggagatgttgaaaaaataagacctaatttatgccctggaggcatttagaaagacatataatacaacatcatgactcaggcaatttaaagatgccactaaaatgtctagacacaccagcgggatagtgagtcatacactgtgtaccatggtgcacacttgaatcttgttctgctgcttctccaatgttttctttgaaaaaataccattttatttggtgaccgtgatagctctcagctctaacaccatgccttcagaaatagaaccagcaggtggaaccacaccttagtgggacttgtttcaaagttgacttgtcatgccttttggattaattctctgtactttccccaccttttggctccacagaccaacagcaacatgtctggatggtaggatggggtaaggaagggtaaagggtatgggggttggggtgggttcagagtggcaaagtcattgcagatcaaggctttgggtaaactttgtgagcagagacatgaatatctctggcaactcaaaattgctcatctttatctatcaatctttaacattgagactttgttcctacatatatgtctatatgatcattacatttttagcatcttagctggtgaattgcatctaagggagcttgagaagcctttctaaagtatgtgagaggaacgatacctagcattcttggggaagcagaagtatcctggaaccagtctccaggtgaccactggaaatctggggcatcattaaaacaacggtggaactggaaacacaaagacctgtctttttcaggtctcagcattcaaataaacagacaggataagcttcaagaagcaatgctcagagtgttaacacagatcccacagatccacggaatatgggaattccaggaaaatttagatgtttatccctttctctcacacttaccttcatccaccccctatttcttctgtttgacaactttgcttttttttttcttcttcttctttttttttgagtcagagtcttgctctgtcgcccaggctggagtgcagtggcgtgatctcggctcactgcgagctccacctcctgggttcatgccattctcctgcctcagcctcctgagtagcagggactacaggtgcctgccaccaagcctggctaatttttttttttttttgtatttttagtagagaacggggtttcatcatgttagccagcatggtctcgatctcctgaccttgtgatctgcccacttcggcctcccaaagtgctgggattacaagtgtgagccaccatgcccggccttgacaaattttctaaaaccagtgagccttagctccttgcctgcctggtcacccaaagccttgaggcccaagcccactatctgttgttgttctgtttgggcaggggccagccaaccatgatggcatggccacagacacagcaggctctcccactcatctctgcagagacctcgagccttgctgtgatgaggaatgttgctgcctcagcttactcctctctgcctggggaagaatgagttagtacatctaacaacagactgtccaactggtcacatgtcttgttcctctgcataaccaaccccgctctcaagttctgcttcctgcaatgacctgacacctgctaggttgttcctgggcagagtttgcctttgaatgtcctgttagttggtgaggaggctgggtctctcctgcatctgggagggtgaaggggactctgtttcaagacaggtcagctctgtgtgatcatagacagtggcaaggccagaaatatattatcttatttaatgctcataacaaaaagtagcctgaagtcattccttcatccaaacaaatgttatgtgcctgtcattatttatagggcttggcatatgtcagcacaaagatctctgcttgtgtagagcttatattctgggcagaagtggagggatgggggagagaacaaaaaattttatgtaagagaattatattttctgggccacttcacattatatacaccctccacaattattaatgtggatatttgttcaacagttgttaagaagacactatgttccaagcactatactgggcattgaaaatacaaagatcagtgagtggccccatatcctccagacactggaagtccaggtagagaggagcaactgtacacaggtggtaaaatgcataaagtgctgtgacagaggcatctacgaagggcagagagacagagccaccaacatccaggcctccagctgcccctaggctgtccatgttccccttcctccccactgcagcccgtgcagggctacctcctcacctcctcactctttcccctgctcctgaacccactcctcctggccacccagcataccccagccctgatgtgttcctttggagtctgattcagggaaagttatactaatgtagtaaataaattcactgactgagtattaggttttgcttgctctttcaggtaatttacatacattttaactggcttttaatgctttgcaacaaagggaggctggtttccttgtgggaagtgccattctgttaatagaccaggaatgagagatttgtggaggccaagctcctacctactctcccctttcattagggcgcactcgtctttggaacttccttcatcctctcaaaacagttctggcatctggatcatcttttccaaaagtgtctttggaattaagacatttttagggttcaacacaacctgaaagatcttctagtccttggaatttcaacttatgatccaggggttcttggcagtgtgttcatgaatggccttcagggagtttaaggactcccgaaattctctgcaaactattgtattaacatgctaagtgcattttcccccctgaagacaaggtctatagttttcatcagagtcttaaagatcttggagactcaaaaaaggtggtcatcattttaggtgatgtgcttgagcctgcagagttatgagagggaggggagaaggggaaaggggaaagaagggagggaagtgaggaaaggccaacacagagactgaaactcaagtttctttttgcccaaactggtgctccttctacctcctccactgcaagagatctttaggtctttggttcaggacctatcccagtggcatcgtaatcctttgccaggcctgttcacccactgtagaggagtaaaagctgctttatggaagcgattttgaagaactagaggaggtttctgctccatcatacagtgacaggtgactttgagctctgaatttactatcggtccttactttaaaaagaaaaacgttaagcttttggggctttgtatccctagagatactgtgtgccactgggcatctgtggagtaagctgtctgattgcagagaataagcatgacctgtgaagctgtccttgcaagcatcaaactgtagagagatcaatcacttgagggagccaaccttcacatgttgacacttctggatccccttgcccaaggcagaaatgcctggctcattttcagattaaaaaaacctgggccggttgtgttatcaacacccagtgtaagtcatcagggcaaatgacaatatacacattctcctagtcaattggaaggctaggtcaggagatattcggcatgagcccagggatagggaaagaaacaaaacatcagaggctggaattccaaatggatccagaaaacagcacaatctttttttttaattttttaattttttaatattttattttttctgtctataactatgtactagactctgacccatgagaggattggtttctcccagagaaagactacaggaaactaggttcccaaataggccctgcagccttggatatgatgagaagttaccagaagttggggagaaggagaacagcactgggatgggagtcattaggcctaagcttaagacttggcattcccacagagtaggtgggtgactttgggccagtcagtgccggctctatggttctgtttccttttctgccaaaagaaggatgtggggggttggataacctgaaagatccctcttggcgggaacatcctcctaagtcattcattcattcttgtctatatgccagcgctgccttccaggcttgtgtgtgaccctcaagcttacctgaagctagagcacttcctaggtgcctctcccaccccaggagtcatgagggtttggtcggctgccagactcaccagcaggaatatgggcacctcttgctgtagcgacaacagtaaaactgccactcccgatccagcactgactcgaagtagcggctctggaatcctgccaccagcccattgttggagcacgtctggtacctgaagagaagacaaccccaggaacctaagaacagtgacacatacacagaccccttcccaagaccccactgccacagttacacactctttctctgacctagattcttaacaatttattccattttatgcaaataatagtctttattatatttgtagaaataacatagcccctccattaaaatttaagtgactcagaattttctaactgaacaaaatttagggaacactgcccctgtcatacctctttcaatatatattgttagatggaagcctgcataaatgggtggatctagaattttacatctagaattttacaaattcgagattgtattattcatgccatttaaaataaaaggtattataattcattttactggaatttaaaataaaaagaagacaaagagaagcacaacgtattgatgaatttcaaataaacatttcttctgcctaagagaagagccctggaaattgagcacaaggatgatcattcgttctgcccctgcacagcatgcaaagcccagatgggcatggtgaatgtgcccagggcagcccagtaggaaagctgggaccacaacccagattcttcctacttatccaggaatctttctaccacccacaagaccataagctctacacagccatggcatgtttttctcagaattctattcctggtggccaccaagaatcctggctgtggaggcagtccttacagagttgcaacaggccaactgaatgcctcaaaccccctctaaagatccctttcctgtcctagctgcttagtcctaattcttcaaatatataaccgctccactccagtccacagacaagaaataatttttgctctttcattctacctgtgctgctgctggtcttcacagcaccttttgaactaaacattgacttagaatagtacaatcatttcttcctttgttccatctctagtatgattttctcccattcccgggcccaattcctatggcgtcttcaggcttcccactttttgctgtgatgataacactattttctacctgaccacagtggatttccactgttcttgctacttatccaggaatctttccaccacccacaagaccataagctctacacagtcagggcatttccactgttcttgctacttatccaggatctagaattttacatctagaattttacaaattcaagattgtattatgcatgtcatttaaaataaaagatattataattcattttactggaatttaaaataaaaagaagacaaagagaagcacaatgtattgacgaatttcaaataaacatttcttctgcttaacagcagagccctggaaattgagcacaaggatgatcatttgttctgcccccacacagcatgcaaagcccagatgggtatggtgagccatggccctttgatgaaatccagtggatttccaccttatagcatgagctctttcacaaacccttccaaaatagttcttcagttacctctccttctttgcatttcccaccatcccagccattggtctatcccctcttatgagtgggcagagccagagcaggcagttgtctatgtgcatggccagacagctgctggaatgcaaccttgtatttcatgggaagataagttttcagaaaatataatgcataaagtaagtaccgtgtgctgactggtgagagaggccttgttgacacacaaattgtaacattatcaacaagtggatttcatttattcttttccattgctgaaaatgaacttgcagatctaacaaaattagatattaaatatattacttgtctgtcatcagaaatcatccgtccttttaaatttattatttattacttgttattcatttattcacctaatgtatataattcaaatatgcatttatttatttatttatttattcattcatttattaaacatctcatactctactactgttctgtatcaatcactttgctattatgttgtgagaagaattgagagatgggctcggtattcggtcaaccatgtaaattagcttgaattccctgttcccaggacttgtaagaagttctggcagactagaaaactcagctataggggctcagtaatgcaggttaaggtgtaaattgagacctatggctctttgatgatctagctttttttttttggtatgtgcaactgtgtagtttattatacatgtatctaggttttacaattttcttttattttactttaagttccgggatacaagtacagaatgtacaggtttattacataggtatatgtgtgccattgtggtttgctgcacctatcaacctgtcatctaggttttaaggcccgcatgcattagctatttgtcctaatgctctccctctcctcacactctacccccgactggtcccagtgtgtgttgttcccctccctgtgtcaatgtgttctcattgttcaacttccacttatgagtgagagcattcactgtttggttttctgttcctgtgttagtttgctgaggatgatggcttctagcttcatccatgtccctgcaaaggacatgatctcattcatttttatggctacatagtattccatggtgtatatgtaccacatttgctttatccagtctatcacggatgggcatttgggttggttccatgtctttgttattgcaaatagtgctgcagtaaacatacctgtgcatgtgtctttacagtagaataatttatagtcctttgggtatatacccattaatgggattgttgggtcaaatggtatttcttgttctagatccttgaggaatcaccacattgccttctacaatggttgaactaatttacattccgaccaacagtgtaaaagaattcctatttcttcacagcctcgccagcatctgttggttcttggctttttaataaacaccattttgactggcatgagatggtatcttattgtggttttgatttgcatttctctaatgatcagtgaggttgagctttttttcatatgtttgttggccacataaatgtcttcttttgagaagtgtctggtcatatactttgtccactttttgatgggattgtttcttcttttcttgtaaatttgtttaatttccttgtagattctggatgttagacctttgtcagatgggtagtttgcaaaaatattctcccattcagtaggttgcctgttcactctgatgatagttccttttggtatgcacatgctctttagttcaattagatcccatttgtcaattttagcttttgttgcaattgcttttggtgttttttattatgaagtctttgtccatgcctgtgtcctgaatggtgttgtctaggttttcttctggggtttttatggttttgggtttttacctttaagtctttaattaatcttgagttaatttttgtataaggtgtaaggaaggggtccagtttcagttttctgcatatgactgatgtagccttcttcattctaccattgctcgcatctcatcaggagtatactaatcactttgtaaatgcctggcatacttcagcaagctatatgagtggaatggactaggctcatgatatggtggaaaggtagctttaggggctgatctaccagggtgttctattctatcctaattcttagtaaagtaggtgagaggtaatttcaatatgaagctctaagaatcataagcaaaactcatatgtgtccaaaaagagaaggttgccataagctagtgctctctgtgacctgttctcctaccatcactaaaatgctgccttcctctaaaacaaagccctttcagaactgagctgggctgtggtttccacggagttgttgttccattgttttggcttgtcttctgtactcagacccctataggggacagagctcccatgggggtaagttcccctaagtaaaaataaatgtaggaagataagccgaactgtttcatggagtaccagttctgaaggcaatccaagttccacaaattccccgccagctgttggccaggctgctggccccagtgcctgtacgggaagtgtgtgtcactttctcacacaccacctcagataactctgccctgtgaagattatttggaccctacagactcagagcctaagaacatatagtgaaagttagataaccaaacataaccctcctcctccggctttggtttgattgccttcacattttggtagagtcagcctgttcaggagtttggtatgtgaaagcattccttccagagccggatctttgtgggggtaccttttcacactgtggggagcagatagtagagtggccaagagcattggctatgctgctggatggctccactgttcttagctgtatcatctgggcgggtttcgtgccctctaatagcctcagtttcctcatctgtaaaatgggcataataatagcacatatgtattaaagttatcgtgaagaccaaataagacaacgcatgtaaaattcctgggattaataaattgcttattagtgtcattatacttatgtttagtctacacagtaattatgagtctactttgtaaaagctgtcccttggctcccctgtctctaatcagtaaaacactggtggattcataggccctccctgagctgctgtttccctaaaacaaagctcaatgaggttggatgtcttagccacccactttggagcacaggtactttagtatgccttaccactctcaggaagtagtattccatgcagtgtctgacattgttgtccagcaaatgtttaatagaagaatgagggaccgaatgagtgacccgactatgtcccattattggaggcagaattgacttttaagagctcatcactcaattccattaagggccctgaaactccctccaagtagtttacatggatcttgggtgagcaatcccttttcttgcttccgttctctccctgcagctccatgatgagggggcaaaataaatatagctttgggcattcctctcctccattcctctcattttcacttttaacaaagctccttatttaacaagactcacctaaacactggccatagctgcaggattacaaacacagagctaggtgagaagagaggcaacttctaaatggaacaggactgggggaactgtcagggattgcattgctaaagttactcaaactcaatttcaaaagagatgggtagcggtcaaatgactaatgctctgactcacttcacagcacctggttgttgctcctgaatggcctggagaacagggcagtggctcaatgctctattccgcttggagggaaactacttggagggagtttcaggccccttcatggatgtgagtgaggagttcctaacagtcaccaatacgatggctaatatcctggtgaattgtataacatgaccgcagctctaaggaaataagactatttccttagagcaggagggcactggtaccttacttacaagactctccttcccatctgagaagacatactttttttttttcttaccacctctttgaaggctgaggttcaatttcagtttcagaaactggagtattgttagccctgctccatctgaaactggaagctttctagaaggaaagtcacaaggtaattactcctcctctgaaaacacatttgtgaacctattctgagaaagtggactttctgaaaatgatttatctcagggtcatcaccctgaaagctaaaacggaagactttctcctgtatctgcaatagtaaaacataacagcagtggggtgcaggggaaagagcccttgttgaggaatcagcagacatgagttctagtcctagccctgacctttacatgctttgtggagcctcacctaaggcactgtgtggagtcagtgataatgcctacaaaactctcggccaagagagtaactggaagagccaggacccaactcagattcatctgaggtcaaagctcatgttcatgagctctcaagaaatataataaatctcttcgagatggtcccacagctctgattggtatgctggacaggacttcttcttgttgtctgcattctttaccaagtccaaagctattggacaggcagaattacagagcatttgcaaggtgtgtgagtgtctggttttgttggtgaacccctctatacaattttagaagttggacttgctaagaagtttggactttaggtggtgtggtgtggggttgagtcaagtgatgaacaaggtaaaaggaagcagcaccatcttggtcaagaactctcaaaatttcattaaatagataatagatgggctggttgtgctggtcttttttttcccagcttcacagacacacaggtgtttcaagggctgttagccagtttccaaccccactgcagagatggactatgagaagttttgcccatgatctagacaagtggctcactccatgtggcacagcatccttaacactcccaaatttctttcccgccccaaaggtggatgaggtcttaaatagtaccaaaagagtttctttcttttagagtaaagctttgatttttgttaattctattttccccagaataattctttgagttgctatcaggcatttataaaaaggcccacagaattttagaatgttcattaagtcttttgacaaatattcactagaacttactctatacctgatgctgcacttggtctggaatctcttcagaagactggtactgataagtaaacactatgacattggacaggcagaattaccagacactgtaactgataagcagacactatgataatacagatactggaaataagtagactggtaccaaagacagaggagcagagaaataggagagtggttggggacagtggagcagtgaagtggcaagggacagagacaaacacagttgggggcaagtttgcccagtaaaagaagccttcaaagttctggatttctctgctaattccaaacagaattgttccatgacccatctctccccttctgctgatatttatacctacttctgtaaaactaggatgacagttcttaacctgacagtattacacaaaaactaaagagatgctatatatcaagtgtagcatagaacctggcacaacgtatataattgaaaggcaggggaagtcatagttattactaccatgatgataaaagtacctgtaatctgatagaaagacaggctacatcctagtcacgaaacatcactttcagtaaatattggagcctacattagaaattgtcaggattgaacttctccaattagacactgagaggagcctcagaaagcacatatcagagcacaaaaggcaataccaagcctctcctccttcaaagatccttcctttcttgacaattccaaatcatactaactttccttccttgtgacatgttgatatcaccattacacatttcacctaacacatactgtcactgagtagcctcatggggctacaatgcaaagtttttgaacactgcaccgtttactgctcatcctcctgccaccatggtggggatatgaacagtctctttaaatagtgttaagttgcacacattctgctctcttcctgcctgcatctgggtaagaattctgctgtcttctccatgtccaggttttaagtctgctagtctgtctacaaggttttaacagtgaagcagaaatgacctgcagaacagcatctctggatagaaagacctagcacaggacagagcgagaatgcctccaaaaatacaaattcctcaggtttttttggaaaaatacaggcaggagaggcttcccctaaggcctctgagaagatctagattatcttgtgagatgcatttatgtcctgagagcaattccaggtcacacaggaattgcatgagctacattagcatcacagtaaatttgacgtgagtttatgaatatcaattataatatttttaaacaagagatctaatgctatctccgtgtctattaaaatgtaataaatattcaagacacttataatgtacacataatatttatagactgtgattaaattatatgttccaaaagcaaaatgatatatttcagaggctctgtaatctagcaatttggttttcaactccagctttgtaatttaccaactgtgtgatacttgtctccatgagtctcagtttacacagagtagtcatgataaagtaataataaataacctttatcaaggacttgcaatgtgcaggcattgtgcttagcactatgcgtgcattaattattttaattatcaaaacaatcctataaaatgggttcaaataatgagcttctcaccacgatcaccattttacgtataaggaaacttaggtttagagaaggtaagtaattcccctaaggacacaagttaatgtacatatattatcttatttaattctcacaacaacagttctagggaggtgtgttttagttgtgaaagctgagtatttcggagttgagacgacttgagtaaaggtagtagtggggtcagtggggctgcattttgagaattgttctgactctaaacttcattaacttttcaatacttcaagatccctcaaagaaacacacacacacacacacacacacacacacacacgatatcttaactctgcagaaatctcttattgattgagaagattgtgtcctgcaggttcccagacagaagcaaatcccctcctgggaggagggagcttttgccatccttacaagagcagccaacaaccatttttgcagagctcaagttcccccagacaattgattcctagcacttaggagagtgacctagatggaaagttggcaagaatcctagatctgtcataaccctattctcccacactcagccttcttgccctcagaagtcatccttaggtggatttgatatcttttttaggtcagcactcactatggctttatccaggaacaaaaataacatcagcatttcatatcacccacagcactgtggaatcaggctggctggctcaggtcctccgtctgccatctgctagccatgcaagggcaacctcctcatgtgtgaaacacctggattccaatactgttgtgaagatcaaacaatattagcttttgaataactcatgggcatagactgtatgttattcatctccatcttcctggggcctgggaaagtttgtgctaataagcatttggtagtgaatgaataaacaaatgaacatataaatgaggaatactctataaatcataaatcaccacgtagatcagggttagggccatagaacctatacttatgtaaagttatggatttctctcctaattccaaacagaattgctccatgacccatctctccccttctactgatatttatatctacttttgtaaaaagaggatgacagttcctaacctgacagcaatgtttttattcagtttttaattgcttcagtctcatggcctttattcctattctgtgaggtaaggaggttgctctagattgtgcccaagaccccctccagtgctggaattccacgattctgttgtactatatttgtgctgcatccttatatttatttttttaaattttattttgaagtaatttcagatttacagaatgcttgtaaagacagcacacaaaattcatgtatactcttcacccaggttcctctaatgttaattttcataactctagagtgtctaggaatgctaagaaatgctaagaaattaaccttggtataacaccaaactgatttcatcagttcttccacaaatgtcaaaccaggataggttactgtgcagcatttagcccttatggcttttgaaataaagagtttactttcaatttttgaaattgatcgagaccttaagattattgagagaatgaaaacctgataaaaacttcattctgcggcggcaaagtgtgtcagccatcctctgtgcatgttttagcgatccttaagaaatcttgaaagaccatcctgcatgttggtaaatgcaataaatcaaaatgagatgtgaacaatacagttggaacccctactatagacactggaatattgggaatcaaagacataagcaaaatggttcccctgtgggaaaacctgcaggcctccttgcggagggccgtggggacactggctggggtttggactgctgatttggtctttcactgcatatgtattgagggcctgttatgtaccagcacttgtctaggcactggggatacagtggtgaatgagacaaagcccctgtgttcatgaagcttatattttagtgagggagacaaaacaagaaacaaatgccaatcaggtagtgacaagggcattgtaggaaacaaagcaggctgagggagtggagacagcgagatgtgtggggagaggaggtggtcttggaaagcatccccgaggaagtgggccctgtgagtactcaatactcagaaccatgactcaggacgactgccctgaactacactgaggcttggtcttgcttagattagggaaatagtccgaccatggaaaacggagttcccacccaacctctccaccttcaaatgcacctcgatgctgccatagccctgttgcatagattctttctcctcttctccagtctgtggcttgtcattgaattcataaactcagctctaacacaaactgccactccaaaacttctccttgagattctttgaagcccggggtaaaaagtagataccaataaatggaccacttttcctctgaactcagactccgtggaaagctggcttgcccaacatcagccacatcaatttcagattcactaaacttttactacctgcccatgatgtgctaggcatttgttttagacttcaatttgctttagagttttcttatactttatcctacaagtatcacagtaacacaagtagcagcttgtgaggtgggagtcacaccttcctttttcttcctttgcttttctttcctttccattcctttcctttcctttcctttcctttcctttcctttctctttcccttcctttcttccttccttctttccttccttccttcaatccttccttcctccctccctcccttccttctctctctctctttctttctttcttctctttcttttttgccagaatgagataccgaatgtcacagatacaagcaggagctgtgaatccaggtttcctgcatccaagcccagggctccttccgctacacagtagctcaatctcactagaaaatttcaccttcatcttattccacacaggacccagtgccctacagcctgtgctgacccaagttagagcagattccctgagaacaacctaggcatgccctgggatggtgaaataccactcatggggacccaggtaaggcctcctggtagttgttagtgccagagaccatcatccaaacttcagaagccggcacttgaagaggtgattttcaacagagaaactgtgatcaatggcagcaccacagaccactcagctatgatggcaacaccttttaaagatggcactttgattagaaagattttctttttagcagatcctatgtgctattgtcaagcctatattcgagactcctcccctcttttaaaataaacctgaaagctaatttggttatacaaggcagcccaactgcacaaaaccatcaacaactgttccctgagaacagactaagcctgtagccaacgtcagatgtaatagctccccagcccataagcaatttctttccttacagatttttcactgagactggaggctgaactcaaaggcataatcatttttaaaagtgcttccagggtaattcgtgtcagtcctggggcagctggatcttattgtaaagaagttgttttgcatgtttgtgagttttcaaccctgtgattagtagacggggagaaggaggcaacagagggtggaaggaggaaaggaaaccaaaattactagacactgcacacccaaaaatgccgagtaagaggaggtggaagaggtatctcgcctatcagcttttcccttgactcccatgggccaaataaaatcatgttatttcaccttcttcctcttttgcttttcttcaaatagtttgggagttcatgacaaaccagtcacagttggcaagtttaaaactaaacatcatttggcttctctctctagcagggatgaacacaaagatcaacagaatgcaagaaaaagccaagagtgttttcaggggtgagccacagctctgtggagccttcagagatcatgcagcctgactgctcactttccaaatgaggcgggagactggagggctgagcgtctgggccaaggtcacaccacaagtcattagaaccaggatccagacccaggcctcctgattcagagcctagggctcttcctctatggcttggggaaccatggctgagtgctgcttgactgtggcacaaaaaacggctgttagaaaggagtcgcacccatgcgatagtgctcctgagaggtgaggactggagggacagttgtaattaggtcattgccatgctccacattaggcagtgggcctggctgtgaggagtcatggagacaacaatcaaggtgagcctggtctctgaatcagcatctgtcagaaggggttttgaataactaaatctgctcaccagaggccatgggggtggatgagaatggcccacaaaggctgtccaagcagcctccacagccccggcaccctcacctgctgctgcctgtgtgagtcctctccccaccccttctacagtccggctgagcccctccacagtcctggtaaccaagtagggatcatccctctggggctgggcttctgctgtggtcttgcaggtccccaccctctccaggaggaagaactgccctgaatctggtcctgtggcactggctctgctgacagagtcagctgtcgggtgggagcccactctgggtggaggcagcagcctctcaggagcccgtcactgtggcaaagtacaaactctttgaagcaaagactctgtggatccaaaccccagctttctagccgaggaaatactggatctctagactgcagtttgtctacctataaatgggatatacccttgttttgagcattacacgagatgatccacataaagcacttagcatggagcctgctcagggtaagcactcaataaatggtagctgttgtcattacttaaaggcccgctctctttcctggctcccccacccatcggtgtttcttcctcttggatttcccatcatcacctctctactggttgtgtcccccagggttctatgctttttcttttttctattttcttttttttttttttttgaggcagagtcttgctctgccacccaggagggaatacagtggtgcgagcatggctcactgcagcctcgactccctgggctcaagtgatcctcctaccttagcctcctgagtagctgggaccacaggctgcatgcaactacaccgggctaatttttttttttctgtagagatagggtctggctgtgttccctaggctggtctcgaactcttgatctcaagtgatcctccctccccagcctcccaaagtgtttgggattacaggcgtgagccaccacacctggccagattttgtgcttgacccctccaatccccactacactaagtacttgttgccacacatctgggttgctctacagatagcacatgcagcagccctccaggtgggcttcctcctccctggactgcctcctccgttctctcctccaagcctcctagagtgctggctccatctaggctgttgtaaataatcagcctagcagtcagtgcctactaggatgagctcctgaccaagcacctgggctgagacccagctgagacaatcacaccccacaaaaaagtacaagctcgaaaaaattccatgccactgcttaaggcagaatgcagtcaggggaagacagcacctctctccaaaaccctttagtaaactattttccagcaataaaacccactttaaattcaggcagagagaaggacctcagtactcataattgagagagcacatttaatcaaggcagtagacagctatttaattccactttcttttgcctaaatgtccttgtcccctcttttccattcacttgctctaaatcaatagttctcaaaccctccgtgctgagagatcaattgtttatttttcttgttcccaaactactgtgggccagtacttttgtaaaatggtaaaaataaatttctaaaaaagaaaaatgccattccgatggcacagaaagttttaatttctataaagtttattactttcagtttctgtacatatcttttggtagtctggtaagcaagcttctcgccgacctacaccagcccctggcccaaactgagagtaggtagaacagcttctggaaggaacagagccacagaggagtctgtctcccacagacactccccatcccaggtttttgtcctgtcatgtagtccgctcagcagcagccctgctccacccagagcatgcagtggtgaggtttggggtgggatttgcccaggctttggttactgatattccttgagagtctagcagcccccaggaggagggatatgcagagatgttcccagccccagtgcagtgcagggactggcccttaccattccatgccagccctgttgatctcctcccaccagcactccgtgggttccccgaggctctgtggcgtgggcatgcaggcgtagttccattgtctgtcagaaccttccttcttgctgaagatgctcctcacggccactatcacctgcccctggggacactggtagctgaagccttgccggttcaaattcacccacccatcatcgctgtagtcatgatactgctggtatgggtatccataatcgccatactggccccaggccatggtgactaggggcagaagtacccagagaagactgaggtccatgctgcctgggattttggcaaacaatgtcactctaagattgctggtctgaccgttttatatagctgccgctgacatgtggcttccagatgtgggtgagaaggatccaactgcagtgtgtcattgcttaagcaaaacttttccatgctgagatgtcagccataaggacattcagcttgttttaaggtggaattctaggaatataccagcagcatgtaagtctaagaagctccctggagaaagaacaactttgtatctagattataaaagccaactgctgctctaccctgtagaaatattcacttgaaaaacactgattagtagcatatttgtccctcacctttcagcacctcacccctttctgtcctaccctacccgctactagcaaacccctgtatttgttctccaaactagccttccgggccacacaaatacccagacagtgatttcaaaataccgaaatcatagactgaagtaacagagccatctaggatttctgtaaggctgaatgcctgtttttttttttaagttgtcaatccaacactttttaacccttgagtataagcgcgggtataccagtttgcagggctactctgagaactcataagttgcataaggaagtactatgggcccatggggagataagttggatatgatttctacacttaagcattctaccatgctgctgaaattggacccagtcaagtctagaaagtgtgctctgctctcaaaatgtaatgggtttaatctaaataaaccccctatttatccttcagtatttttgccctcacattgaattttcttttcattgagttataatttacatataattaattcaccttttaaaatacataatgtacagtaacatagccagcaccctaatcaagacttagaacagttccatcaatccaaaacatccccttatatccctttgcagtcaaatcttcccaaacacccagccattggtaaccactgatttactttctgtctctatggttttgccttttccagaatgtcaagtaaatggaatcataccacacgtagcctttcatgtccatctttcacttagcataatgcttttaaggttcatccattttaaaattcaacatctcattgtatgtgttagtattttgtttcttgttattgttgagtaatattccatagcatggatgtaccacagattgtttatacatttactagttgaaagacatttgggttgtttccagtttttgaaaattcattactttttatgtaatgaattttatattcattatattttatataatgaattacataaatgtaattataaagttgatataaacatctatgtataggtttttgtgtgaacaaatttttatttcatttgggtcaatacctaggagtgagattgctggttcacaaggtaatgtatgtttaactttaaaagaaactactgaggccgggtgtggtggctcatgcttgtaatcccagcactttaggaggccgaggcgggcggatcacgaggtcaggagatcgagaccatcctggctaacatggtgaaaccccgcctctactaaaaatacaaaaaattagccaggcttagtggcgggcgcctgtagtcccagctactcgggaggctgagacaggagaatggcgtgaacccgagaagcggagcttgcagtgagccgagattgtgccactgcactccagcctgggctacagagcgagactccgtctcaaaaaaacaaaaaaaagaaagcaagaaactacctagctgatttccaaagtggtgataccattgcccaccactaccagaaaattgccattaaaaaattttagctattcaaataggtttgtagtgatatttcagtgtggttgtgattttcatttctctaatgatccatgattttgagcatcttttcatgtgctcattacccattccatgcatccgttgatgatttggcttttcaaattttttgaaacctttgggcatctcttaagcacatagtatttcccatttctcatcagtattgttcttaaagtttcttagaattgtgatcatagaccaattctatctacagcctctgtgaagtttgttaaaatgtagacagtggctcttctccaggcctgctaaatcataacctcacaaggggtgctcaggtatttatattttaaaaaattttccaggtgattcttattcacatcaattgctaagagtcaccttcctaaaggaatgtggagccagagaaaaatcacactattaatcccaccatctgcctagcctgtggcacatttaccagacggtattcagtctagatcaaacaccaagatagtcttgaaagggaaagacagtcatacatgagaataaagcaacaagtaactcgtgtgtgtgtgtgtgtgtgtgtgtgtttgtgtgtgtgttgggcatgcagttttctttgatgatcatggttactgaagcgagggggagaggatctgggctgaacagctatgtgaggcttagttttgtttttagcaccatcttctcccaccacttccatccgtaagtaactgcccagtgctggcatcggaattcttcctagcttagaaggatctctctgattcatgatatgctgaagcaatcattctccaccttatcagcatttaaggattacctggaaagcttttggaaacctccagagtctaagcaatttctggaccaatcagatcagaagcttctgagcagggtcctgacaatgacgtcctttgaaaccttccctataggcttctcaccggaagccagggttgagaacctctatgctagagggtttttttttttttttaattttttcagtttatcatcctgatgctcatgagttgtatcttgcattctggacatgatatgagctattttaaaccttaaagagctctaagagacaaagcagattatcataaacactcatctttattatacatttgttttccaacaatttccagggcctctgcctgatctccactctccgcagatttctttcaactacagctagaactacctcagctggattccctttaatgtgcaaaaataaatatcttcatgctatggtccagttttaatatagatttctgttacttaaagctgaaagcaacctaactcatccagtgtctcaggagattccagaaactgctgatgcctttgagagagattctggtggccgcatagagaatgatttccatacgcagacattgagaacataagattaatgcatttacagttgaccatgtgttttcaactaggttactatgttatcttcctcataactttatatgttagtgaggcattattggaattagtttctcacagatggggaaactgtggtgagagaacattttgggccaaatttctagaactggaaggatatgaccccatgtcttctgattcccattctgcaatgccttccatcatttcatcaaagttacagttactaattataacatttatgaataattgtcaaataatgcacttataaagtatgtatattaacatacacatataactaatttgcgctacgcatttctgctgttatttgaaaagtctactcaatagaccctggggactttaaagaactaaatgttcaataagtagtttttggggtgttgctctaaaaccaacagcatcagcgtcacctgggaacttgttagaaatgcaaatcctccggcccctctcagacctactgaatcagacactgtaggagtagagcccggcaatgtgtgtttgaacaagccctttaggtaacttgatactcactaaagtgagaattaccgtatagcagataatgcagaacactctacccaaattccaggtgtcacttctcgagaagttatgtagtgatactgaagcctagataactcagttcactaattttgattctggcgcccacacaattcaccactgggctatcttacctcctagtagataatggacttgagatattttggagattctgacaaagagcattcaaaagtctccatgattcttctttttcttctacctcttattcttcttttctctctccttatcctcctccttcttcggctgtattgagatataattaacataccatacaattcaccacttaaggtatataattcaatatatcccttaaattagtatgttcacagagtttatgcaaccaccaccgcaagcaattttagaatattttaaccacccaagaaaccctgaacacatcagtagtcgctctccatttcccttcatcctttagccctaggcaacaatcaatctactttgtgtctctatggatttgtctgttctggatatttcgtatgaatagaatcattcaatatgtggtctttcatgaataggttctttcatttagcataggttttatgttagcggttcataaggttcatccattttgcagcatgtatcactagttcatttctttataatgccagataatactctacagtatacatctaccatatattatttatccatttacaagttgatggacatttgagttgtttccactttttggctattatgaacagtgttgctacaaacatgtatgtagaagtatatgtgtggacatatgttttcatttctctcaggtatatactcaggagtggaattgctgggttatacggtaattttgtgtttaatcttttaatgacctgccaaactgttttccaaagcaatcgtgccattttacattcttaccagcagcgtatgagagctccaatttcttctccacatcctcaccaacgcttattaagtctgggttcttctgaaaggtgtaggaactcatagccactctggtgacactttttgcgacctggatccactcctgtctggcagctttctcaaacatataatccctttttgagagattctgaatataatactttgcccgattttaattgagagcacctagaatggccctagaatcaactcattcctaagttacttttacactttctggattggggtagctgctattgtatattgggagggaatgatgtagacttacagaggtcaccctggagcagacctgatccactggagaattccagatgtgacgtgctggccccgaggagggctgctcagacaggagaaggcaaggctcatgctagtgcctgggtgaagctggtagccccagatgaatggatgcttaacccaaaatattgactgtgagttattggaggattccattttgcctgctgtcttttttcccttttaactcctgtgtataatcaggacttggctgcagctctaggtggccagagtactatcacaaacttcccagcaagtgtatgctgagccatccgtggctttcctccaaaatgagtctgtgccagtttcacggtttagctgagagaggcattcaatagcctcagtacacccaggctgtcctcaccttcagcaaacttgccacccttgcatgacccattgctttttaagatcatttgtggaacccactgtcatatcatttggggttagccccgagggccaccaataaggttaaaaatgctcatactggaagcagcaggagaaagagtgacaatccaagttgaggaaatagagaagattgggaggagtagaataaggtgcacctactgtgtgctaaatactgtactatgtgctttacatatgatagaccaattgaccttccagcagttctaagaaaattaggttcagagatcactggtagctcaccccaattttcacagctagtacagaaaggtgacttgaatttgttagtaactatactaccccaagtgccaaatggtcacagcagggcctcagagcagtggcagatggttgtgagaagagcagagactcctaaaatccaaatatctaagttaaagttctggttctgcaagtaatcaaaatgaccttttgatttgggtcagatagttttttgttgtggaggctggctgccctgtgtattataggatgttggacagcatccctggcctctatccactagatgccagtagcatcttctcttccaccactgtgacaatcaaaaatgttccagacattgctaaatgtctcctggagggaaaaatcatctctggttgagaaccactgaatcagacaaaacccataacctttgttttatcatctgtaaaatggaggataatcacaacaccagccacttaccacgagattattgtgacagtcatatcaaatagtggtcttgcaaagactttgtcaagtgtaaagcttgaaacaaatgtacgttgttagtctgacctcagggtaacactagaagctggagttgagggaacaatcatgcatattagtgtaatgaacagccccaggactccgcagggcagaagagtgttcttgtgcagatgatgactggaggggtttgggaatgagtaaagctgggggaatatggctccaccactctctggagttccattaatatgtggatgaatgtcaatcgcagaggttcctgagagtgagtttgcagggagaggtgtcaggataacagggctgagcactaaaggcagagtgagggtagagaattcaggaggcttgggaacagtaggcagatggaggagctatcgtggtggagaagaagcttgggaacttgcgagcttgggaaccaggactgtgtcttggggtgagagtagggatggggatggggatggggtgctgctaagccaagttagctctgagacactcacagaaggaagcttcagggcccaagtgcctaattagtgttctggggtctgtgaggatgaatgaagcacagagatgtatgtgtaggtgctggaaatattgctttagtaaatgtattatatgctcataagtggaggaacagagttcaggatactggttacaacctctgagctcatgactcgctagagaccatggttaaaaaaaagcgcgggaggaggttcattggagagatttggttacaaacgggggaaaagaaagaaaacaatttaatcagaaagtgcttaagtgatgtcattttaagccaaattttctaatttgaaattgggtttttaagtgggtaaacctaaagtttataaaataaataacagcccctttcatttgtgtagcatttggcacgatgtatataaaccacacaatccagcactcaataaatatttattcttttccatgtgcagggatttaacagatctcagttcatctttgcattggtgatggtagtaaagttggctttcttatttccattttatcagtttggaaatagaggctttgagaggtacagtgatgtccaaagttacagaaatattgggtgacagggcttgggcataagccaaagttccctagtttgagccctgccagttctcttggaggacacggcattgagggatttggtgacacatcctttagggaagcaaggtggccaattctagagcactttgccagttcacacagtttgtccaagcctttccctcctacaatcctgaaggcaggtggtgggggcagggctttagcaggaggagcagcctccctgaaaataacatcctcccatacaggacatctctgctggtgccgtcctccagtgcgttttctgtgtgctgcttcctctgatcaagctcggcttgctctttaaccaagattcacgcattcttgctcccattcctgaagctacagattggcacctcttttcggcattgttcaatcacggtacatcaacttcagataatggacttggtcacctaagaagcatactgtctctcccagctctaaaaacacacacccaccccaaagtattgatacatgtgaggtccacagaccacctgcatcacagccatggaggcatgttagaggaagattcctgagtttttgacagccttgcttcagtggaatcctggaggtggggtcccggaagctgccatttttttttagacggagtcttgctctgtcaccaggctggagtgcagtggcgtgatctcggctcactgcaacctccgcctcccagttcaggcaattctcctgcctcagcctcccgagtagctgggactacaggcgcgccaccatgcccagctaattcttgcatttttagtagagatgaggtttcaccatgttggccaggatggtcttcatctcttgacctcatgatctgcctgccttggcctcccaaagtgctgggattacaggcatgagccactgcgcccaggcggaatctgcctttttaacgagctttcccacatgacttttatgcatcccgaagtgtaaaaccacaggctaaggtgcataaggatgtttatgattttgtaagcttcccaagtatgaggcagaaccaggcagggctcctctgccaactaccctgtcgttggttacagtagaaatactcccctggctctgtggcctgtgggctctgctaagggctttgcaccctaatcctgctctcagggagcccaccacttgcctcctgtcacacaccacccacacaggcagtgacagagcagaactgagaactgcaggaaaggcagcagctcagccttcttctcatgcctgtcaacagcctggagctgagcacgctgcacactaatgagtactattttctaccccagctttttaaaatgctgcaatattaacaactaccaaaataattcaactctctacagcagtgggttggcttagccgaaaaagacaccaacggggctatggcatctttgctgtgttgctaaagccctgcagagtatatgcacgtgcacatgcactcaaatagaaatgcacatactttaatttatcaggaaaactaaatgagacaatacatgtaaatgtaccgtgcttggaacagagcctggtactgctggtacaaaaaacaatcagatgtcattttgcaaggggatgtactgaatattccctatttacttttcagatctttctctttcctgcactgtgttctaggaggctttatgtgctaccttaaggtgctctcttgccctctggttcctgcttgggcttggccaatgagaggcaccagcagaatatggaaggatcaggagaggggtcaaaatatgaattcccctggctccctgccaccaaggcctggttggcagtggccaggtttctctccatgcagccttagcttttgctggctggccccctttccaagggaaatgcttctgctaggttccagcaacctcactccctcaccctgcagctttaagactataggggtgatcttaccgtggtttatagctgtagctggccctgggatgttcacaattaaccctgctcacatctctgtacatagttatttcattaattctctccagtcactactgttgaatatggacctgtttcctgccaggacctgactgatataaggaacaactgtctggatttgatccaaggaagatcctgaaacaatatgactgtctccagcactgggcatctgtctccagtttcttgtggtccttaggtgctcatggggagaagaaagtcctccccagctgtgtgatgttgggaagcatccatgtgcttccctcttcaatgcaaagccagcaccacttccaccatttttctacccttaactctaatatcattccatccaaacacctctgtaaccatttcccttcaggaagtcaaaggtaacccttctcctgaaaatcaactgggaatccctctgatttgtccttatgtgtgtgtcaggcttcccactaggccatgttgtccctgggcctggagatcctcctgagcaaaggaaagtgagatcttgccaacctgcatgcttacatcagtaggtctaactgtggtacaaacttttatatccactatattgaatgtcatctccatactctttgaaagacacatcctctcgattttacaagtgagggcgatgatgcttagagagaaaattgcccagggttatccagctggtagagaagatctgttttgaagcctgttataaaacaaagcttgtgctctcaaaatgaagaacctctcagggttgtatcagatcagaaaattccccacactctcacaggactgcataaaccccctcagagcccttattccaatcacaattttctatgtatttgtataattatttgataacatctgattccccatactagactataagttccaagagggccagtcctgtgcctgattttacatactgttgtttcttcagggtattagtactgtgtctgctgcattgcagacattcaataaatatttttcatatgtctgttcactgaaatcaggagactggaccaaatgacctgtgaggtcacatgcagtcttttgacctcataaggatctaccttaaggatcaagaggtgaattctgtttatccgatgcctcccaagatatgaaatttagatcaggaagtagctcagaaagtacagtttttggccaggcatggtggcttatgtttgtagtcccagcactttgggagactgaggcaggagtatctcttgaggtcaggagttcaagaggagactggataacagagcaagaacctgtctctacaaaatttttattaaaaattagctgggcggccgagcgtggtggctcacacctgtaatcccagcactttgggaggccaaggcgggcagatcatgaggtcaggagatcgagaccatcctggctaacacagtgaaaccccgtctctactaaaaatacaaaaaattagccaggcatggtggcagatggctgtagtcccagctactcaggaggctgaggcaggagaatggcatgaacctgggaggtggagcttgcagtgagccaagattgggccgctgtactccagcctgggtgacagagcaagactcggtctccaaaaaaaaaaaaaaaaaattagctgggcatggtgcatggcttttgtcctagctacttgggaggctgatggaggaggatctcttgggcccaagagtgcaagagtgcaaggctgcagtgagctatgattgcaccactgcattccaatctaggtgacagagcaagacccagtctctaaaaacaaaaacaacaaaaaagaaagtacagtttttctgacttttcattgattgacagatgaccccagtatatctgagcagctgctgtttggtaagccagacaacaagccatctgaaagcaggaaagacgcctttgcattcaccactgtgtccccagagcccaactcggcctggtgtattgattacggatattgaatcagtgttgtcttgcacggatgacttgaaatagacccacatcaatgaagtaaaggcactctccgctcctcttttctcaatttgtaccctttatcctaaaaaatgctttcaggagtcactgaagcaagacttgaaataatgtgaccttctgggtagtaatattacagaaaaaataataatgaaaagcacatcacgtggcaatatccaaaatgagatggctttagagaaaaaaatataattcaaaaaacgaagaggaaaaactgcaaaaatgtcatgttttgtataccaaaataacctatagcttcaactaaaagaaaagtctccaaatgcacaaaatgcaaagaaatttgtttttttcagatatatgaacataatagtatcataagtagtgtcgtgtaaaacttattctccctttttctctctatttacctatgtgtgtgtgtgtgtgtgtgtgtatagatgtgtccattcctacttagatggcttctgcatcaaggtaactattttttgtaacagtatggctagatcagacagctcatctcatttgaccatcccaaagaaaatgcattataacccacaatccttagtagctatcaagtaactttatcaatgatcagtacttcctgagatattctgattttaagaattttgacctgatgccttacaaaggcactaaatggtccttgttctctctcaggtaagggcgtactggctcagtctatcttaccacagccaacagcacataatctaagacctggtgtagtgggttacatagtgtcctcccaaaatgtctgcctatcccaaaactgagaatgtgactttgtttggagcaaagatctttgcagatgtaattagttaaaaactcaagatgaagtcatactgcagttagagggaggctatgggccaatgactggcgtccttataagatgagaggacatagagggacacagaggaagggatgataccaagatggaggcagagattggagagatgcatctacaagccaaggggctcaagggattgctgggagccaccaggagctaggatgagtcaaggaaggatacttgcttagagcctttggaaggaatgtggtcttgatgacatcttgagttttgacttctggcctccagaatggtgagagtaaatttctcttattttaaaccatcagattggtggtatttgtgatggtatctctaggaaattaaatcatctgggctcaagggggttccatcattggggtgtacagtcatccttctagttacacctgagtgaataccacgcaatcgtggcaggccttctcagcttctctaaaccaccttccttttctctctgacagacgccacttgcaccaggttgtccctccacattttaacttggatggaacatcagtgtctgcttcctgagcagctgctaagctgagggactgcatgacaaactctggcagtgaggggcagggagctcttggggaggagaggagggaatctcaagcgaaggggaatgagagacggagggaaatgtgtgaagaaacatctctccttcctttcttccttccacagtctgctctgaggcacactttctccttgcaaacattctagagaagtccaggtgcccaggggccacatctgctgaatatcacctcacacatcccctctttcctcacctcatcttcactgggatttgcagatcccaaataaagcttccttcacatttagtactcaccacagactccaacatttagtagaccccggcaagacaaggtggcataacctcagcaaattaattagtgtttctgtgcctctgtttttccctctgaaaaattagcagtttctgcctcatacaattgtgagaaattaaataaatcaacatatgtaaaacacttgaaaggtgtcaggcacctaataaatggtaaatgatatgcactgttatctggcttatggaggttttcattctgataccaaatgttaatgagaattcttcatcaaaccctaatcctctagaaacaatctgataatcatataatatcttcttttaatgaggtcagcagaagaaaaagaaatgcaaaagcaacatattaggggaaggattattaggtggaaaagggcctgagagagtaaatatttttttttccaggtctcagtttataagttaaaaaaaaatcctgagaaaacagaggaaaaaaaattcattcctttttacaaaggcaaagaagtacctggcttaactcagtaagcaagtgcagcagcagcaaccactctatgacataagagccaccatctgcacgggatgtgctgacaccatgctaagctctttatattcagtatcacaattaatcccacaactatcttttgagacaggattatacacatttagacatgagaaaactgtttgataagaaaaggttaattaattgccaaggtcacactgccaaatagtggagcacctgggatttgtacccaagaattctgactttaaaattcaccatctcatctttccctatagtgtgaggcagtctgagtctagctctaaagctagacccttattacaatgctggatgagtcctaaaagagtagagtataaaatgctaattttcccatcgaagcaatccttgtctctaactacttggacaccctacaagtgatattgcatagttctgaatggaggtgtcccagactctacaatttttgtctccttactgtcttgttagtaagagctaaacacacacatgtgtaaacacacacacacaaccattagcaactgaaatagactcatgaaacatcaaaaggtggcttataggcagctcgtgatttcaaatcatgatacttaaagtactctgcagcacgccagagacagcagcctggtgggtgaggctcctggaacacgcagcactgccatagcaccgatcgtcccagagtcaagagcctcctgaaacactgccatctgagcaacatgctaggtccctgacaaagtccctcccatgtttagctttcagcctcccctctgacataggcacttccctccgctggcctaagaatgatgatttagaaggtgtgtagtgccctaaattggaaagggcagtaattttcctgaacaacaagaactgacattttcccatggctgatcagagaggaaccaacactgtaatgctagtcaatcccttcttagagctccctggataaaagatattataggagcattaagtatcattgaagttggaaggaagaagaaaaacataggaagtgttttcacgggctggaatggaaggctctgagtcagggatagctgacagttgcctttgcaggtttcctttcattgtggtgtcaaagacttacctttacgttagcttgctggccaccggtcagactgatgaacagtattaaggacaagaatatttcctcagaaagtgtgttcttaaaatgtactcatactcatgagaagtgagttataacctatgaaagtaccttgtgtatgtggggaaatggctgatctctcttccattctactttctgtttagaatgcactgtgaaatagacagttaccctgaatgacttgaaaacttaagtgtcactgattcctggaatgattgggtgaattgtttataaataatccttgtgccactgtaattagagttatgtgaatcctatacctggatctaaaaaagcactcttttgacaatacacattcttcccatccaggaatgtaatacgtctatgcactgattcaagcaaaagcatttattaaaacttgctggggaccttggataagtcatcaaacctctctgagcttcagtctccacatttgttaaacgaagggattgggttaggtaagaggccttttccaactctaacattcacggattctatatttaaaatatattcttgaaaggatgaatacttttttttagcattgataatacttctgtctctgaaacctcaacatcactattaaattattagttatgggacagaatcggttactgagaaagatgaggagctgtcctctcacagtctgcccctgcttcttcccaggaacggtatgattcagtcacatgaattacatctaggtacctgaaaacaccatgatcattcttacttcctggcctttgtctggtcttcacatggcatggaacactctgtgtcctcttctccattcaccagactcaccccaattcaccctgcagacttcagcttcagtgcacctcccctgggaagcctcgcaaggccctaattcaccctgcagacttcagcttcagtgcacctcccctgggaagcctcgtgaggccctcccagctgcacagtgcccctcctggcattcctgtttcgagtgttataccacttcccaaactttactgtgcttaactgtttgctttctagaagctttttctttttttttttctttaagttttagggtacatgtgcacaacgtgcaggttagttacatatgtatacaggtgccatgtcggtgtgctgaaaccagtaactcgtcatttaacattaggtatatcgccaaatgctatacctcccccctccccccaccccacaacaggccccagtgtgtgatgttcccctttctgcgtccatgtgttctcattgttcaattctcacctatgagtgagaacatgcggtgtttggttttttgttattgcgatagtttgctgagaatgatggtttccagcttcatccatgtccctacaaaggacatgaactcatcattttttatggctgcatagtattccatggtgtatatgtgccacattttcttaatccagtctatcattgttggacatttgggttggttccgagtctttgctattgtgaatagtgccccaataaacatacgtgtgcatgtgtctttatagcagcatgatttataatcctttgggtatatacccagtaatgggatggctgggccatcatcgccacactgacttccacaatggttgaactagtttacagtcccaccaacagtgtaaaagtgttcctatttctccacatcctttccagcacctgttgtttcctgactttttaatgatcgccattctgactggtgtgaaatggtatctcattgtggttttgatttgcatttctctgatggccagtgatgataagcattttttcatgtgccttttggctgcatagatgtcttcttttgagaagtgtctgttcatatccttcacccactttttgatggggttttttgttttttttcttgtaaatttgtttgagttcattgtagattctggatattagccctttgtcagatgagtagattgcaaaaattttctcccgttttgtaggttgcctgttcacgctgatggtagtttcttttgctgtgcagaagttctttagtttaattagatcccatttgtcaattttggcttttgttgccattgcttttggtgttttagacatgaagtccttgcccatgcctgtgtcctgaatggtattgcctaggttttcttctagggtttttatggttttatgtctaacatttaagtctttaatccatcttgaattaatttttgtataaggtgtaaggaagggatccagtttcagctttctacatatggctagccagttttgccagcaccatttattaaatagggaatcctttcctcattgcttgtttttctcaggtttgtcaaagatcagatagttgtagatatgcagcattatttctgagggctctgttctgttcgattggtctagatctctgttttggtaccagtaccatgctgttttggttactgtagccttgtagcatagtttgaagtcaggtagtgtgatgcctccagttttgttcttttggcttaggattgacttggcaatgcgggctcttttttggttccatatgaactttaaagtagttttttccaattctgtgaagaaagtcattggtagcttgatggggatggcattgaatctataaatttctttgggcagtatggccattttcacgatattgattcttcctacccatgagcatggaatgttcttccatttgtttgtatcctcttttatttcattgagcagtggtttgtagttctccttgaagaagtccttcacgtcccttgtaagttggattcctaggtattttattctctttgaagcaattgtgaatgggagttcactcatgatttggctctctgtttgtctgctattggtgtgtaagaatgcttgtgatttttgcccactgattttgtgtcctgagactttgctgaagttgcctatcagcttaaggagattttgggctgagacgatggggttttctggatatacaatcatgtcatctgcaaacagggacaatttgacttcctcttttcctaattgaataccctttatttccttctcctgcctgattgccttggccagaacttccaacactatgttgaataggagtggtgagagagggcatccctgtcttgtgccagttttcaaagggaatgcttccagtttttgcccattcagtatgatattggctgtgggtttgttacagatagctcttattattttgagatacgtcccatcaatacctaatttattgagagtttttagcatgaagcgttgttgaattttgtcaaagaccttttctgcatctattgagataatcatatggtttttgtctttggttctgtttatatgctttatagcactaaatgcccacaagagaaagcaggaaagatctaaaattgacaccctaacatcacaattaaaagaactagagaagcaagagcaaacaaattcaaaagctagcagaaggcaagaaataactaagatcagagcagaactgaaggaaatagagacacaaaaaacccttcaaaaatttaatgaatccaggagctggttttttgaaaagatcaacaaaattgatagactgatagcaggactaacaaagaagaaaagagagaagaatcaaatagacacaagaaaaaatgataaaggggatatcaccaccgatcccacagaaatacaaactaccatcagagaatactataaacacctctacgcaaataaactagaaaatctagaagaaatggataaattcctcgacacatacaccctcccaagactaaagcaggaagaagttgaatccctgaatagaccaataataggctctgaaattgaggcaataatcaatagcctaccaatcaaaaaaagtccaggaccagatggattcacagccgaattctaccagaggtacaaggaggagctgataccattccttctgaaactattccagtcagtagaaaaagagggaatccttcctaactcattttatgaggccagcatcatcctgataccaaagcctggcagagacacaacaacaaaaaaagagaattttagaccaatatccctgatgaacatcgatgcaaaaatcctcaataaaatactggcaaactgaattcagcagcacatcaaaaagcttatccaccatgatcaagtgggcttcatccctgggatgcaaggctgattcaacatatgcaaatccagaagctttttctattaggttggtgaaaaagtcattgcggtttttgccgttgaaagtaatgacaaaaaccacaattacttttgcaccaacttaatagattttaagatccctggtggtggaaacgttatattattcaccgttaaatcccatttctagcagagtatctagcccattatagatgctcaataaatattcactgttgctattacagaattttaaaccatgagcagtgttaggacatccacatagtttagtgacagcacttcacctctaagcagtactttgacatgcatgactgtcagttggttcttctgagtgcatctgagtgttatggagtgcttctccatcaattactagcgcaattaagcgcccaacagatatttgggcatttatcctatggccagcggagaaacactctatttcacttttccgggatggagaaggaagtacatctcacaatttccccagggccctggaatctaccacatccttggtagagataatgcagatctgtgaaagtagcctctgatggggttgctccaaggatatttcatgaaagaatggcaaaggagtatttgttgccatttatggcaagcccaatacaaagctccaaaaacttcataaggaatagaaaaccccaaattgaaactgtaaggaaggagactcatctacaaattttgactggaactctagaaaaatagctctggaaaatagttttttgggtaaatatatgaatatagtgtgtcttatatattggtaagctccataaatattatccaatgatatattaatcacttctgcctctaaattactatctgatttttagctaaggttattcactttctttgtatgagctcctttgtttgcacaatgtggaaatgtagaaaggactactcatcttgaagggtcatggtgagaattagtctactcccatttcttccttattgccagtttaccctccagctgctaatattccagctgacaataggaaagcaatttgatggcagggatctagaaatcttttattgttattattattatttgttttgttttggccagtgtacagatttttattttatttatttatttattatttttatagtttttggaaaagaggtggtgtttggttacatggatgttttttaagtggtgatttctgagattttggtgcacacaacacccatcacccaatcagtgtacactgtactcagtgtgtagtcttttatccctcacctccctcccacccttccctcgactccccaaagctccaaagtttttgtttgtttgtttttgttttttgtttgtttgtttgttttgttttttgtttttgagatggagtctttctctgttgccgaggttggagtgcagtggcatgatcttggttcactgtaacctctgcctcccaggttcaagcgattctcctgcctcagcctcctgagcagcttggacaacaggctcgtgccaccacacctggctaatttttgcatttttagtagagacggggtttcactatgttggccaggctggccgttgtatcattcttatgcctttgcttcctcatagcttagctttcacttataaatgagaaaatatgatgtttggttttccattcctgagttacttcacttagaataatggtctccaactccatctagattgcggcaaatgtcattatttcattcctttttatgtctgagaggtattccatggtgtgtgtgtgtgtgtgtgtgtatatatgtgtgtgtgtatatatatgtgtatgtatatatgtgtgtatatatgtgtgtatatatatgtgtgtatatatatgtgtatgtgtgtgtgtgtgtgtatgtatatatatatatatatatatatatatatatatatatatatatatatcacattttctttatccactcattgactgatgggcatttgggctggttccatactttttgcaaatgcaaattgtgctgctgtaactacatgtgtgcaagtgtctttttcatgtaatgaattattttcctctgggtgatacccagtagtgggattgctggatcaaatggtagctctatttttagttctttaaggaatcttcacactgttttccatagtggttgtactagtttacatgcccaccagcagtgtaaaagtgttcctttgtcaccatactcatgccaacagctattttttttaaatttttttttattatgtccattcttgcaggagtaaggtggtattgcattgtggttttcacttgcatttccctgatcattagtgatgttgagcatgtttttcatgtttcttggccatttatatatcctcttttgaggattatctattcatgtccttaggggacatggattagtatttttttcttgctgatttgtttgagttctttttagattctggatattagtcctctgtcagatgcatagattgcaaaatttttctcccattctgtgggttgtctgtgtactctcctgattatttcttttgctgcacagaagctttttctttaatttccttaattaggtcccatttatttatttttgtttttgttgcatttgcttttgggttcttagtcatgaagtttttgcctaagtcactgtctagaaggtttttccactgttatcttctagaatttttatggtttcaggtcttagatgtaagtctttgatccaccttgagttgatatttttataagatgagacatgagactccagtttcattcctctacatatggcttgccaattatcccagcaccagttgttgaatagggtgtcctttccccactttacgtttttgtttgctttgtcaaatactagttgggtgtaagtatttggctttattgctggttctctattttgttccattattctgtgtgcctgtttttataccagtaccatgctgttttggtgactatagtctttgctagtatagtttgaagttgggtaatgtgatgcctctagatttgctctttttggttagtgttgcttcagctatgaaggtacttttttggttctatatgaattttaggattgttttttcaagttctgtgaagaatgatggtattttggtattttgatgggaaatgcattgaatttttaatttgctttctggtcctgggcttaagaaagaaaggaagtgaaggtatagtaataattaaagacaggaagttcttgatcagggttgtgaaagctcctttccctgtaatggattagagaggtcctaaagatcctagccagactacagatcaaatccctgctcttcaatattctttgatgtctcaagcaagtacagttaaactctgagtctccacaattgtaaaaattgagataataatatccagttctcaagattattataaggattaaatgataatcatgtctgtgaagtactcaggcactgcttggcacatagtaacctcttggtagttgagaatcattccaaggctatttttctagcctgccacaatcctgccaccagactccacattccctcctcattcagtaaacatagaagtgcagcctggaatgctttccatcttctgtctgtttaaaaaatctactcaaatgagtaggtgtgtggtggagtggcgaggggagagactgcggagtcagcaagaaatcctttggcagttaaagttatttgaactcaaagcctgtgttcgcccaactgtaaagtagggataataacattgtctgcctcacaggattcttgtataacataagaaaatgcatgtgaaagactgagcacaatgcttggtagcaagcagtcaataaaggatgcctattaactctgctaggcaataagagctcaactcagtagcatcctcctgtctgaaggtttttctgtaattgctccctgtgctgccataacacactgtctgtagtgcatttcttttcaacatgaaattgtcatattgccatgtgtaaaaattagtagcatatataaaacatctatacaagctcatgtgctccttaaggacaaagactgtttcagtgatgaggtcctcacaatcagtgggggttacatagtaaaggctcagaagacattgttgaactgaactgaaatgacaaattaaaacagaaagcttttctactaagatgataactaggaagacagttatcatgtcccctaaacaacagtaaaactagcaagaagtaaaccatgtttaacagtcactctaacatggatggtcaggaaattgattgcaagtgagaaaaagagatggaaataattgagaaaaatatttatgtgtcagaaagaaaagtgtgaatcaattactagagttatgaatattaagcaagttgcttgagaagcattgatgtacggatgaattgggcaatttttcccaagttttccacaaaaaggaatcaagatcactcagctgctgacagatgatttttacctttcagattcaacattatttactgtcacccagctaaagacaaaggagtttacacgttgtgtatgtaaatattaactgggtgatgactcacatttttatgggagctctataattcatagttatacgtgcagacaagcatcccactgagagactgggtgtggggagaagggcatggaaattaaaccactgcaagtttccacgcacaccacttcctccttatctgtgaaattttatcttctctgttattgtccaagacgctgttgtgcaaacccctcacatctgaaagtcctgggaagagaactgtggtatgagttttcaggaatcggggctagatatgggagtacttttccatgaaacaaaagcggataacaccccccgccctcaactccagggcttaatcaaaggagaccaaacccttgctataggcatcaagtttgtatgcaggatgaagtatggcagacaacgagggagggagtgtttattcaaacacatatgcagcccctgtcctaaatcagtgccaaattgggtgatggcaaacctaagaaatacagtgtctcactgatacaatcccagctcctcctcaatgttaaagggtaatttataagttaaagtgaaaagatttttttttccaagagtcttgctctcacacaggctggagtgcagtgacgctatctcggctcactgcaaactctgcctctcgggttcaagcaattctctgcctcaatctcccgagtagctgggattataggtgcccaccaccacacctggctaatttttgtgtttttagtagagatggggtttcaccatcttgaccaggctggtcttgaacccctgacttcatgatccacctgccttggtctcccaaagtgctgggattacaggcgtgaactaccatgccgagccaagaatattttcaaaaactaaatttagtatctattgtttgcctgaaaggtccaggggatattggtgttggtgggaatggttctaattcttatgttcctggaagtccacagatttctgttcatgcccaggatctgctgcgctcatggaggatgtcaggcaagttgcttagccatataagtttgggagcaggtgggcagtttcccaattggtacaatgagatgactggttagctcatctccaagacaattgggcttaacattttggagatcatagataacttggagaatctgatgaaaactgtgaaccttctttccagaagaaagtacatacatttgactttcaacatttcttttcagaaactttatggacaccttgaatttatccacggactgcaggtccgtgttctaaaggattgttgcatagtgttttggatagtttgaatactaagaatgaataccaagaggatgtaaaacacaagggcactgcttttccttcaaatataacaatttaaaattcaatattccagagatatcaagttaaaaatgaaagatctgatatcttccgacttttaatccatatagtgctataaagttttttttttttttttttttgagacggagtctcgctctgtcgcccaggccggactgcggactgcagtggcgcaatctcggctcactgcaagctccgcttcccgggttcacgccattctcctgcctcagcctcccgagtagctgggactacaggtgcccgccaccgcgcccggctaattttttgtatttttagtagacacggggtttcaccttgttagccaggatggtctctatctcctgacctcatgatccacccgcctcggcctcccaaagtgctggggttacaggcgtgagccaccgcgcccggcctagtgctacaaagttttaatcgaatgactaaattataagccttgggttccttttgtatatttttaaataaaactgaattttcctaatgaattaaactttctacttgcactatgatttcaaagatatttccccaggaaaaaatatttggctccaactgtgaatatacacaaaattatcacattttggtaagaactaatatctactaatgaaacctcattggcttaatttggcttaagaaacaccccctccaccacctccatgtgaccactgtttcagaatgttagaaaaacaaactaaagtattgatgacttaacagaagcactgtgttgatacagtcatagattcccttttaaaaatctgcttaatgaactggagcattttaaaaattgctccaacaggtcaaacaggagacatgtcaggtgggaagtgaaaggcggcaaacataggcaatttcgacatacgcagataatggcaagatcatgtcacaatcataacatggctaaaatctccatttggactgaaaagtattgggtatcttagtgctctccaaattgcctacttcttttttaacttaaaaatttacttagactgtcttatttatttatgtagttcccaagtccagttcagtatctggcacgctgttctcactgcacgatcttttacttcttcccatttttttggaaaatgtcagagtaggaggaagcagaaagatctgtatgcctctcatcttcctgttgtagagactgaaatcctattagattcagttccttgagccaaggtgttgagtccccagctacctccctttctggtgtaaatatttctggaatgtgtaacacttgaatgagatggtaactcatgaatgtaatataaaatatggtctcccagttcaatttcacacatatacctgaatctgggacattgaggaaaccaaagacatgatgggcaaggaaagataggatttgattgcatcgagaagaggggagagcctagaaaacaactaaggacatgagctgagatgggatgtggtgggaggtggcaggaggctggaggcacctggggcaggagaatgctagaagagcaagcagaaaatacaaaggctaaattggccttcttcagttttactccgaataattccaatccagttgacaagaaattatatgtaccacactactctgaatgtgtcagttattttattttgaaaacttttgcacatggtaggcagtaaaaatatttgtggaatgaatgaaattatcaccaacacccctatgccatatgataactaagttaagaatccttctcattaaaatgcagttctaaagctgaggcccccttagagcagactgacttttatcagaaacagtatggccatctgtcctgaataaatgcctttaaggtcatttttcaaaattcttcatcccatatttcttctatgtcatggaatctgtgcatttcattctactatatttcctttgcttttccttgtggccaggttgatcatacaactcttactaccaaaggactgactgcttgacagaaccactgcgttgtattagtgacattaattgaacattgaacaggtgtaaggaattagaatagcacctcacagtgccttagctcatttgcatctggtgtggattaacgttattcccattttaccgattgaaattctaggagttaaaggtcatacaattagtaagcagtggagcagatttctattcctcatcatgtgaactgaagtcagagctctcaagccctgtgctatgcagcttgtgctctgcagagagagggcacctagtcaaggttgctgacaagtgaaaaacagttcaccatattaattgaaaattaaagtagagctaaaggataccaaagaataataaatgccgaggccccagtgccaggtatgctccatttgttccagaatatgaagttcccactcttctaaatctctgcccacgagagcctgctgctcatcaggcaaaatacaaggaggtgatctcagagggtggtgctgccttcacactctgctcaaaggtgtgggtgacatacagcctgcaagtgaccttgagaagtaggctgtttctctcccaccccttcccaggacctatgggactctacaaaaccctcctgcttgttacagctttctgagaggcgtagggctccccagggaaatggcactggggaggtaatctcgcttctagcagttcctgtactcactgcctcattcttctaagctatcctggtggaaactgccggtccccagccagtgaaccagaaccatgtccctgttcctttctgtagagcaataaaggaaaagtctggcttgtgtcagctgtggctgccctgggtcacaactcacccccagggaagcagactggttttctgaacattttctgagttccagcctctttacagcaagaagaccaaaagtgggagctcataccttgctaagaggtagagctactaattacccagtgcctgctctgctattggcgttttaacatacattcttatttaattgtcaccatattgctgtgaagatgatcagaatatccctggtttacatactgggaagctgtgtctcagcgaggtgaagtgatgtacccaaggcaaaccctacagaatgtcaagactgagctttataaccagtctgactagctgtgaagttaatgctttcccctattctatactactttacagcccctccctcatgatctcctctgcggtatgctcaaacacgagatatcagtgcccacttcccatgagaggctcttctttccagctgagggctggatccttgcagcattcattc

SEQ ID NO: 887 - DNA, 2758 bp, Homo sapiens
  Genbank Accession No. AL049949
gacaagccacagaacccctcttttctaaaatggagacaataatttcctacctcccaagggagcagagaggcctcgtggcacgtccgtggccagggagcccactgtcctggctggcggcgggatcgtgcgctcctctgtctcccggatgagaagccccgtttccatggtcttgacccttcctttctcccggctgtcagaactgggtctcttgattttgcccctacattatgcctctgtgggaaaaaaaaaaatcagaccaagaaatgagcctgaaattcagtgtttaccatggctcaaggatgcccatctggtgtccagttgccttttgtattcaaatgaaaatgctttgtacaactgaggagttacagtgaagtgttaaccaggggtccagggagcgagttgaaaagatggagtgagtgtatttgcagccagggagctgcagggtggatttgaggggccataccctctgagcacttaaaaaaggtatttgctccaggccaggcagcaggctgtggacacccttgccaccactggggactgccactgaggactccccgagcacgttgttccccgtcttctccaaggtgttgaggtgagctggggttggccccggcccaggcttctgtcccaaggagaagctgccactgacagtcatcctaccgcactgctaaagagaatgttcgcagtggtgggcggcgtgcctgtgccaacccttccagggacccggccatgggggaccttggcccaaggatgcctggggcctgccagctgtgctgcaaaggtggggggcccacaccctaaaactaacccaggccccagaccactggaggccagggcttccctgcacgggctaaggggtgttgggatatcaccccaaagtgaccttgccagtgagctgttcagcaggtagccactgccctgccatctgtgcagagccagccaccttgggggctggggttcccgctttgaggcccaccttccatactccccttgactcggctctggctgaactggggaactctcttgtggtcagcaaagcccctgccatgcaggccaggtgccattgagaattaagtgctcagagggccaggagcccaggggatgggaaagtgtgtggttttagtacgttcaaaagggacaatcgcttgcagttggtagatctagcgatctagttgggagataatggtgtttaccccatatgaagtattcaatagttctacttgtgaatttgtatttattttgagttatacttgacacagaattccttttttaaaaaaatatgtgtgtattttggaaaaaaaattcatagatgttaaaatttctgcatggttaccagtttttctcacgacactgaatttggtagcttttcccgaaaaaatcttcacagtaattttttgtctgtatatatttgagggcctttttttaaaaaaaaaaaagaaaagaaaaatataattgtttgatttttgagattaaaacaaacaaaaagagaggcattttcaaaatttcagaactttcaggagggcaagagaatatcaaacaaagatttctggaagtattttgccaaccttctggttgagctgcaagaaaatatttatggtgagaacttttctgtttcccgttattgggtttttggctggtttttgtttgttttttactatgctttggtctgtaaaaatatgcaactgaactacattcagaaggaaatattgtctacatagaatattatatgaagttggtacataattctgatgaggaaaaaaaatctttgcaattctttaagccatattgttgtttttctgtgttgttttccctggatgaaaatatcagtattaagtagacagcatattatccaagtgtttagacttattaatatgttcttgtcctgtatttatacatatgtgtattttggaaagtattgccttttttaagggaagctataattcgatacatagtgaaaaagggaatggtgacccctttgtgcctcttccactgaggataacaaacagcattgtaatccattctcttgcaccttcttcttcttatcttgttattacggttttattaattttgtagagggacagggagtgggcaaggggaagaagcagcttatttgactaaccagcccctctgtggtccaccagcgtcttggcttggtgggagggctctcaatcagcagggccccaggagggaagaagaagtggggcaaagcctggcctcgccgctcgggagctttgccatctgagccacgcctcctccaggccatgctccttgaacttggaaatgtcaaccggagcccttacaccagccctccagcatctaatagacttgaatctactctaaacgaatatttaatccaacctcactacattgtagctcagtccaacgactaaccctgaaatgggggtgttccagccttcagcgagatggccaagcggtcccctgggggctgtggcagcgggcttatccttctctgttgccaaccttgccgtccgacctcctccgcccccatgcggtgaccccgtccgtgtctgtgtctgtccatacgtgtgagtccagctaaaaagacaaaacagaacccgtgggcccagctcggaaggtgcgtggagaaggctccgacgtctccgaagtgcagcccttgggatggcattccgttgtgtgccttattcctggagaatctgtatacggctcgcctatagaaatatagcctcttcatgctgtattaaaaggacttttaaaagaaaaaaaaaaaaaaaaaaaa

SEQ ID NO: 888 - DNA, 2199 bp, Homo sapiens
  Genbank Accession No. AL049957
gggggtatttcctgaaagatgctaatctatttgccaaacttggtcttgaatgtactgggggcttcaaggtatgggtatatttttcttgtgtccttgcagttagcccccatgtcttatgtgtgtcctgaaaaaataagagcctgcccaagactttgggcctcttgacagaattaaccacttttatacatctgagttctcttggtaagttctttagcagtgttcaaagtctactagctcgcattagtttctgttgctgccaacagatctgaactaatgctaacagatccccctgagggattcttgatgggctgagcagctggctggagctagtactgactgacattcattgtgatgagggcagctttctggtacaggattctaagctctatgttttctatacattttcatctgtacttgcacctcactttacacaagaggaaactatgcaaagttagctggatcgctcaaggtcacttaggtgagttggcaagtccatgcttcccactcagctcctcaggtcagcaagtctacttctctgcctattttgtatactctctttaatatgtgcctagctttggaaagtctagaatgggtccctggtgcctttttactttgaagaaatcagtttctgcctctttttggaaaagaaaacaaagtgcaattgttttttactggaaagttacccaatagcatgaggtgaacaggacgtagttaggccttcctgtaaacagaaaatcatatcaaaacactatcttcccatctgtttctcaatgcctgctacttcttgtagatatttcatttcaggagagcagcagttaaacccgtggattttgtagttaggaacctgggttcaaaccctcttccactaattggctatgtctctggacaagtttttttttttttttttttttaaaccctttctgaactttcactttctatgtctacctcaaagaattgttgtgaggcttgagataatgcatttgtaaagggtctgccagataggaagatgctagttatggatttacaaggttgttaaggctgtaagagtctaaaacctacagtgaatcacaatgcatttacccccactgacttggacataagtgaaaactagccagaagtctctttttcaaattacttacaggttattcaatataaaatttttgtaatggataatcttatttatctaaactaaagcttcctgtttatacacactcctgttattctgggataagataaatgaccacagcaccttaatttctaggtgggtgcctgtgatggttcattgtaggtaaggacattttctctttttcagcagctgtgtaggtccagagcctctgggagaggaggggggtagcatgcacccagcaggggactgaactgggaaactcaaggttctttttactgtggggtagtgagctgcctttctgtgatcggtttccctagggatgttgctgttcccctccttgctattcgcagctacatacaacgtggccaaccccagtaggctgatcctatatatgatcagtgctggtgctgactctcaatagccccacccaagctggctataggtttacagatacattaattaggcaacctaaaatattgatgctggtgttggtgtgacataatgctatggccagaactgaaacttagagttataattcatgtattagggttctccagagggacagaattagtaggatatatgtatatatgaaagggaggttattagggagaactggctcccacagttagaaggcgaagtcgcacaataggccgtctgcaagctgggttagagagaagccagtagtggctcagcctgagttcaaaaacctcaaaactggggaagctgacagtgcagccagccttcagtctgtggccaaaggcccaagagcccctggcaaccaacccactggtgcaagtcctagattccaaaggctgaagatcctggagtctgatgtccaagagcaggaagagtggaagaaagccagaagactcagcaaacaaggtagacagagtctaccaccacagtggccataccaaagaggctaccgattccttcctgctacctggatccctgaagttgccctggtctctgcaccttctaaacctagttcttaagagctttccattacatgagctgtctcaaagccctccaataaattctcagtgtaagcttcaaaaaaaaaaaaaaaaaaa

SEQ ID NO: 889 - DNA, 1090 bp, Homo sapiens
  Genbank Accession No. AL049977
ggggcagaatgagatattaaacccaatgctttgattgttctagaaagtatagtaatttgttttctaaggtggttcaagcatctactctttttatcatttacttcaaaatgacattgctaaagactgcattattttactactgtaatttctccacgacatagcattatgtacatagatgagtgtaacatttatatctcacatagagacatgcttatatggttttatttaaaatgaaatgccagtccattacactgaataaatagaactcaactattgcttttcagggaaatcatggatagggttgaagaaggttactattaattgttttaaaaacagcttagggattaatgtcctccatttataatgaagattaaaatgaaggctttaatcagcattgtaaaggaaattgaatggctttctgatatgctgttttttagcctaggagttagaaatcctaacttctttatcctcttctcccagaggctttttttttcttgtgtattaaattaacatttttaaaaagcagatattttgtcaaggggctttgcattcaaactgcttttccagggctatactcagaagaaagataaaagtgtgatctaagaaaaagtgatggttttaggaaagtgaaaatatttttgtttttgtatttgaagaagaatgatgcattttgacaagaaatcatatatgtatggatatattttaataagtatttgagtacagactttgaggtttcatcaatataaataaaagagcagaaaaatatgtcttggttttcatttgcttaccaaaaaaacaacaacaaaaaaagttgtcctttgagaacttcacctgctcctatgtgggtacctgagtcaaaattgtcatttttgttctgtgaaaaataaatttccttcttgtaccatttctgtttagttttactaaaatctgtaaatactgtatttttctgtttattccaaatttgatgaaactgacaatccaatttgaaagtttgtgtcgacgtctgtctagcttaaatgaatgtgttctatttgctttatacatttatattaataaattgtacatttttccaaaaaaaaaaaaaaaaaaa

SEQ ID NO: 890 - DNA, 1565 bp, Homo sapiens
  Genbank Accession No. AL050002
gggcaggtttcaaaatcaggtaagaaaaccatcatcattaactgagcaccagctgtgctaagcctgccacgggcgtatccttgcagcctcacaacagtgggaggtctgtatcctgaatgtcctcattttacagatgaggacattgaggagaagagacttacccaggctcacacagcagctcagcctgttccaggcgctggtcagtgcgtgttctttgccaccagcctgtcactccagtggcagctccagaaacggaggctgttgcttttatccctaaactgcatccacagagaagccccaagaaggaggttggggccagctcataaaaagcctgaatgccaagccaaggagtggatgcctccagtcatatttagaacaaagtcaagtataaatttacagagaaaaaattctaagacagttggatgttgtcctgttggtgaggaagggaaaggtttttcttgtagggaactggaaccagcccactactgcacgcttgtgagctgtcatggaaacctgatccccaacagcttttgaggttgtttgtttgtttgtttgtttacctgtcttgggctttgttgcttttggcaaaaggtacttctaacaagggagggcctggactgagggggaccaggtcttcttgctgacctcgtctacaaaggcaaaggaaggcaaaggaagctgtctcgggtgtttctgaacaacgtgactcatgaggggctttggctacctcttgcgttccccctagagatgtccaggccttacatttaatcggctttctctgcggtggggtagagaatggagctcccgccttgcgggcagtgctaaaggtggagctgggggattttcctgggaatgatttgagggctcttgaaagcccatgtgttccaaagcgtctttaactctgggatagcattggaagccgctgtcatgacaggacatggcactggatggctggcagagagccctggctgggagttagggagccctgggttggaatccagccccacctcttttatgccacaggtttggtcaagttctctcccgctcagggtagggctgtgaactccctcttacagctaagaacatgcagcttagtgaggacaagacccttctagagctttacccctaatccccccccaggagccccgaggccggcattattcctccccattacaggtgatgagccccaaattcagagagcttaagcaacctgctcagggtcacgtctccaacaggcagtagagtcaaggtataaaccaggtctgtttttgtaccagagtcccagactaactgttggtaggaatcttgtaaccagtcatgttttcttccttgttttggccgctgggaagctcaaagtcaaattcgagaccctttttttttccaattgtgctgagtctcctactagactcgcttcattctagctttctgcttttgcctttaccctaatctttttatttttatgctattgtactttatttttgtaagttgccgagatatctgttttgcaacaagatgggctatatctaaataaagacatgatcaaaggaaaaaaaaaaaaaaaaaaa

SEQ ID NO: 891 - DNA, 1500 bp, Homo sapiens
  Genbank Accession No. AL050024
gggggttgccgggaactgcgttccaccaaatacatctctgatggccagtgcaccagcatcagccctctgaaggagctggtgtgtgctggcgagtgcttgctcctgccagtgctccctaactggattggaggaggctatggaacaaagtactggagcaggaggagctcccaggagtggcggtgtgtcaatgacaaaacccgtacccagagaatccagctgcagtgccaagatggcagcacacgcacctacaaaatcacagtagtcactgcctgcaagtgcaagaggtacacccggcagcacaacgagtccagtcacaactttgagagcatgtcacctgccaagccagtccagcatcacagagagcggaaaagagccagcaaatccagcaagcacagcatgagttagaactcagactcccataactagacttactagtaaccatctgctttacagatttgattgcttggaagactcaagcctgccactgctgttttctcacttgaaagtatatgctttctgctttgatcaaacccagcaagctgtcttaagtatcaggaccttctttgggaatagtttttccttttcaagtttttcaagatgtaggtatatccatgaatgcaatttgcatttaaattccacgtatcctgtagttttaattcctcattgttcttaaaagactgttgatactataaacatcagtgaatcattatattttaaaacagaaaagggcttctcagataccctccatctactggcccatcccctctcctaaacaaaactccttcaaaacaggttaaaaaaaatatgttgtcatgaatcttcacagtaacatttcagaaaggtgcttttttggtactcttcatgggaacagtttagcagccatgagtgatcttcctttgaaagagaatgaaagaccctgtgacatttcacttcaaaaataagccctgtagctctttacggtcgcatagtataaaattataccctgcatgctgaccctcgcttggaatggaatgccagaaatgcatggcagcagctaataagtaaagctgattaactatttatttgtcaatgttattatttaatgagctttcacatgtgatttgtttcaaaactttaattttttaatgttttgaaactttttcatggacctaaatattttcctatatgatttgtggttgattagaaatatgaaatacatgttgtagatatgtaaaatgaatattttagtctccttattacatatatgttcatggtgaactttatcaatagtatggatctttttaaatcaataagatgctttgtaaagttgaaataagtaatactttcttgtttaatctgtgcaatcagaaggtgtcttgaccttcaattcaattggtttcttttaacaaaaataaacactgctaaaagttaaaaaaaaaaaaaaaaaaaaaaaaaaaaaaaaaaaaaaaaaaaaaaaaaaaaaaaaaaaaaaaaaaaaaaaaaaaaaaaaaaaaaaaaaaa

SEQ ID NO: 892 - DNA, 2621 bp, Homo sapiens
  Genbank Accession No. AL050118
gcggacgcgtggggcccacatcatcgccctggagagcattgcatggttcactgtcttttactttggcaatggctggattcctaccctcatcacggcctttgtccttgctacctctcaggcccaagctggatggctgcaacatgattatggccacctgtctgtctacagaaaacccaagtggaaccaccttgtccacaaattcgtcattggccacttaaagggtgcctctgccaactggtggaatcatcgccacttccagcaccacgccaagcctaacatcttccacaaggatcccgatgtgaacatgctgcacgtgtttgttctgggcgaatggcagcccatcgagtacggcaagaagaagctgaaatacctgccctacaatcaccagcacgaatacttcttcctgattgggccgccgctgctcatccccatgtatttccagtaccagatcatcatgaccatgatcgtccataagaactgggtggacctggcctgggccgtcagctactacatccggttcttcatcacctacatccctttctacggcatcctgggagccctccttttcctcaacttcatcaggttcctggagagccactggtttgtgtgggtcacacagatgaatcacatcgtcatggagattgaccaggaggcctaccgtgactggttcagtagccagctgacagccacctgcaacgtggagcagtccttcttcaacgactggttcagtggacaccttaacttccagattgagcaccacctcttccccaccatgccccggcacaacttacacaagatcgccccgctggtgaagtctctatgtgccaagcatggcattgaataccaggagaagccgctactgagggccctgctggacatcatcagggacctgatgaagtctgggaagctgtggctggacgcctaccttcacaaatgaagccacagcccccgggacaccgtggggaaggggtgcaggtggggtgatggccagaggaatgatgggcttttgttctgaggggtgtccgagaggctggtgtatgcactgctcacggaccccatgttggatctttctccctttctcctctcctttttctcttcacatctcccccatagcaccctgccctcatgggacctgccctccctcagccgtcagccatcagccatggccctcccagtgcctcctagccccttcttccaaggagcagagaggtggccaccgggggtggctctgtcctacctccactctctgcccctaaagatgggaggagaccagcggtccatgggtctggcctgtgagtctccccttgcagcctggtcactaggcatcacccccgctttggttcttcagatgctcttggggttcataggggcaggtcctagtcgggcagggcccctgaccctcccggcctggcttcactctccctgacggctgccattggtccaccctttcatagagaggcctgctttgttacaaagctcgggtctccctcctgcagctcggttaagtacccgaggcctctcttaagatgtccagggccccaggcccgcgggcacagccagcccaaaccttgggccctggaagagtcctccaccccatcactagagtgctctgaccctgggctttcacgggccccattccaccgcctccccaacttgagcctgtgaccttgggaccaaagggggagtccctcgtctcttgtgactcagcagaggcagtggccacgttcagggaggggccggctggcctggaggctcagcccaccctccagcttttcctcagggtgtcctgaggtccaagattctggagcaatctgacccttctccaaaggctctgttatcagctgggcagtgccagccaatccctggccatttggccccaggggacgtgggccctgcaggctgcaggagggcactggagctgggaggtctcgtcccagccctccccatctcggggctgctgtgtggacggcgctgcctcaggcactctcctgtctgaacctgcccttactgtgtttaacctgttgctccaggatgcattctgataggagggggcggcagggctgggccttgtgacaatctgcctttcaccacatggccttgcctcggtggccctgactgtcagggagggccagggaggcagagcgggagggagtctcaggaggaggctgccctgaggggctggggagggggtacctcatgaggaccagggtggagctgagaagaggaggaggtgggggctggaggtgctggtagctgaggggacgggcaagtgagaggggagggagggaagtcctgggaggatcctgagctgctgttgcagtctaacccactaatcagttcttagattcaggggaagggcaggcaccaacaactcagaatgggggctttcggggagggcgcctagtccccccagctctaagcagccaggagggacctgcatctaagcatctgggttgccatggcaatggcatgccccccagctactgtatgcccccgacccccgcagaggcagaatgaacccatagggagctgatcgtaatgtttatcatgttacttccccacccctacattttttgaaataaaataaggaattttaaaaaaaaaaaaaaaaagggcggccg

SEQ ID NO: 893 - DNA, 3958 bp, Homo sapiens
  Genbank Accession No. AL050367
ggggggagacgagcaggtccgcgacgctgctgctgtgcctgctgggctgccacgtctggaaggcggtgacaagacgctgcgggagcccggcgccggagcccaagaggtgacgttaaaggtgcacatcagcgacgccagcacccaccagcccgtagcagatgcgctcatcgagatcttcaccaaccaggcctccatagcctctggcacctcggggactgatggcgtcgcctttatcaagttccagtataagctgggcagtcagttgattgtcaccgcctcgaagcatgcctacgtgccaaactctgccccatggaagccaatccggttacctgtattttcctctctgagccttggcctgcttccagaacgctctgccactctaatggtatatgaagatgtcgtccaaatagtatcaggattccaaggtgcccggccacagcctcgcgttcatttccagagaagggctctgaggttgcctgagaacaccagctacagtgacctgaccgcgtttctcacggccgccagctccccttcggaggtggacagttttccttatttgcgaggattagacggaaatggaacaggaaacagcaccaggcatgacctgaccccagtcacagccgtcagcgtccacttgctgagcagtaatggaacgccggtgctggtggatggtcccatctatgtcactgtgcccctggccacgcagagcagcctgaggcacaatgcctatgtcgcggcgtggcggtttgaccagaagctgggaacgtggctgaagagcggtctgggtcttgtgcaccaggaaggcagccagctgacgtggacatacattgccccccagttggggtactgggtggccgccatgtcccctcccatcccaggtcccgttgtaacacaggacattaccacgtatcacacggtgtttcttttggccattttaggaggaatggctttcatacttttggttttgctgtgtctccttttatattattgcaggaggaagtgcttgaaacctcgtcagcaccacagaaaactgcagctccctgcaggactggagagttccaaaagagaccagtccacgtccatgtcacacattaacttgctgttttcacgccgagcgtcagaattccctggcccgctgtccgtcaccagccacggccgccccgaggcccccggcacgaaggaactgatgagtggagtccatttggaaatgatgtctccgggcggcgaaggggacctgcacacccccatgctcaagctctcctacagcacctcccaggaatttagctcccgggaggagctcctctcttgcaaggaagaggataaaagccagatctcctttgataacctcactccaagtgggacgctggggaaagactaccataagtcagtggaggttttttccttaaaggcaagaaaatctatggaaagagaaggctacgagtcctcgggcatgatgactacaggggtagttacaacaccgtgctctcacagcctttatttgaaaagcaggacagagaaggtccagcctccacgggaagcaaactcaccattcaggaacatctgtaccccgcgccttcatcacctgagaaagaacagctgctggaccgcagacccactgaatgtatgatgtcgcgatcagtagatcacctcgagagacctacgtccttcccacggcccggccagttaatctgctgcagttctgtcgaccaggtcaatgacagcgtttacaggaaagtactgcctgccttggtcatcccggctcattatatgaaactccccggggaccactcctatgtcagccagcccctcgtcgtcccggctgatcagcagcttgagatagaaagactacaggctgagctgtccaatccccatgccgggatcttcccacacccgtcctcacagatccagccccagcccctgtcttcccaggccatctctcagcagcacctgcaggatgcgggcacccgggagtggagccctcagaacgcatccatgtcggagtctctctccatcccagcttccctgaacgacgcggctttggctcagatgaacagtgaggtgcagctcctgactgaaaaggccctgatggagcttgggggtgggaagccgcttccgcacacccgggcgtggttcgtctccttggatggcaggtccaacgctcacgttagacattcatacattgatctccaaagagctggaaggaacggaagtaatgatgccagtttggactctggcgtagatatgaatgaaccaaaatcagcccggaagggaaggggagatgctttgtctctgcagcagaactacccgcccgtccaagagcaccagcagaaagagcctcgagccccagacagcacggcctacacgcagctcgtgtacctggatgacgtggaacagagtggtagcgaatgtgggaccacggtctgtacccccgaggacagtgccctgcgatgcttgttggaggggtcgagtcggagaagtggtggccagctgcccagcctgcaggaggagacgaccagacggactgcggatgccccctcggagccagcagccagcccccaccagagaagatctgcccacgaggaagaggaagacgatgatgatgatgaccaaggagaagacaagaaaagcccctggcagaaacgggaggagaggcccctgatggcgtttaacattaaatgagctatcgcagacccacctgactgtggaatataaaattgccaaatatcctttctcatggaagcgcgtacccgttcgtggaggaaacggaacggcagcccagccgtgggacggacgtggacgtttactgcattcctgtttgccgtgtaaatgttagaaaggaattaaagttattactcggaataaaggatgactttggcggatgtcgcccctgcaaggaggtggctgaaagtggtgtccagatgtccttccgaggactcggcgtatccgccaccagggacattaagaaaccgcacgtgatgtcgctatgctctaacgatcacctcagttctccctcggattctgggaacagatgaaactttttgcatcgcttgagtcatttttatcacaataatcctactgtgaagctgtcgttgagaacttaggttggcacgtagcgtctcaaggtatgcgttctctcaaaggaaagctatgcatcgctgcttctttgtctgattttgcttagattttgctttggttaggttgcgttttggggtttgcctttttttgttgtcgcttaaatgcaatttggttgtaaagatttgattcctttgtgttcatctgttccgcttctcagcggtccatctcagcgtctcccttcaggaaccgctgagtgtcctctcttaacatccaagccttttaatgaaatcgtactgaaatctgtatcagctaagagtcctccaatcctggtcccattaactccaagtgcctttttgtcagtgacaacagacagtccctcgctttttgttgttgttggttttcttaacccctttaatggaactgcctggattttatacagttattaaaggatgtctcttttgctttaaactgcatgctgccaagtgccatttggggtcagcatcctcgtttcaacacagtgtgctctctagttatcatgtgtaacgtgggttctgtttagcgaagatagactagaggacacgttagagatgcccttccctgctccatccctgtggcaccattatggttttttggctgtttgtatatacggttacgtattaactctggaatcctatgggctcatcttgctcacccaatgtgggagtctggtttgagcaagcgagctgaatgtgactattaaaaaaaatttaaaaaaaaaaaagaaaatcttatgtactatccaaaagtgccagaatgactcttctgtgcattcttcttaaagagctgcttggttatccaaaaatgaaaattcaaaataaactctgaaaaaaaaaaaaaaaaaaaa

SEQ ID NO: 894 - DNA, 2450 bp, Homo sapiens
  Genbank Accession No. AL079279
gtacacattccaaaaagagattgatacacttgcaatgaagggttcttgcttgagggagccaggagtcgggtttgtcttgccaatggaagttggagtggagccactcccgactgtgtgcctgtcagatgtgccaccccgccacaactggccaatggggtgacggaaggcctggactatggcttcatgaaggaagtaacattccactgtcatgagggctacatcttgcacggtgctccaaaactcacctgtcagtcagatggcaactgggatgcagagattcctctctgtaaaccagtcaactgtggacctcctgaagatcttgcccatggtttccctaatggtttttcctttattcatgggggccatatacagtatcagtgctttcctggttataagctccatggaaattcatcaagaaggtgcctctccaatggctcctggagtggcagctcaccttcctgcctgccttgcagatgttccacaccagtaattgaatatggaactgtcaatgggacagattttgactgtggaaaggcagcccggattcagtgcttcaaaggcttcaagctcctaggactttctgaaatcacctgtgaagccgatggccagtggagctctgggttccaccactttgaacacacttcttgtggttctcttccaatgataccaaatgcgttcatcagtgagaccagctcttggaaggaaaatgtgataacttacagctgcaggtctggatatgtcatacaaggcagttcagatctgatttgtacagagaaaggggtatggagccagccttatccagtctgtgagcccttgtcctgtgggtccccaccgtctgtcgccaatgcagtggcaactggagaggcacacacctatgaaagtgaagtgaaactcagatgtctggaaggttatacgatggatacagataccagatcaatcacctgtcagaaagatggtcgctggttccctgagagaatctcctgcagtcctaaaaaatgtcctctcccggaaaacataacacatatacttgtacatggggacgatttcagtgtgaataggcaagtttctgtgtcatgtgcagaagggtatacctttgagggagttaacatatcagtatgtcagcttgatggaacctgggagccaccattctccgatgaatcttgcagtccagtttcttgtgggaaacctgaaagtccagaacatggatttgtggttggcagtaaatacacctttgaaagcacaattatttatcagtgtgagcctggctatgaactaggggaacagggaacgtgtctgccaggagaacagacagtggagtggaggggtggcaatatgcaaagagaccaggtgtgaaactccacttgaatttctcaatgggaaagctgacattgaaaacaggacgactggacccaacgtggtatattcctgcaacagaggctacagtcttgaagggccatctgaggcacactgcacagaaaatggaacctggagccacccagtccctctctgcaaaccaaatccatgccctgttccttttgtgattcccgagaatgctctgctgtctgaaaaggagttttatgttgatcagaatgtgtccatcaaatgtagggaaggttttctgctgcagggccacggcatcattacctgcaaccccgacgagacgtggacacagacaagcgccaaatgtgaaaaaatctcatgtggtccaccagctcacgtagaaaatgcaattgctcgaggcgtacattatcaatatggagacatgatcacctactcatgttacagtggatacatgttggagggtttcctgaggagtgtttgtttagaaaatggaacatggacatcacctcctatttgcagagctgtctgtcgatttccatgtcagaatgggggcatctgccaacgcccaaatgcttgttcctgtccagagggctggatggggcgcctctgtgaagaaccaatctgcattcttccctgtctgaacggaggtcgctgtgtggccccttaccagtgtgactgcccgcctggctggacggggtctcgctgtcatacagctgtttgccagtctccctgcttaaatggtggaaaatgtgtaagaccaaaccgatgtcactgtctttcttcttggacgggacataactgttccaggaaaaggaggactgggttttaaccactgcacgaccatctggctctcccaaaagcaggatcatctctcctcggtagtgcctgggcatcctggaacttatgcaaagaaagtccaacatggtgctgggtcttgtttagtaaacttgttacttggggttactttttttattttgtgatatattttgttattccttgtgacatactttcttacatgtttccatttttaaatatgcctgtattttctatataaaaattatattaaatagatgctgctacaaaatgtaaaaaaaaaaaaaaaaaaaaaa

SEQ ID NO: 895 - DNA, 655 bp, Homo sapiens
  Genbank Accession No. AL079372
tttttttttttttttttgaacaggcagaaactctttaatcaggctttttttccaactctaaaacaaaatcccattttttccttaaatttagttcctcaggaacagagaactttgcaatgatgatctcaactctgcatcatctggtgactcctgattctgcaggactaagacatttcccaagagttctgctgcatcagccagtgaggacaagagttcttcagtgcggttcagctcaaggacacctaggcttccccagcagggggcttgcttgcaggtctgacaaaccacagagcgttgagcagatggcctgggactcccagacctggcagagggttttattagggcccgcctggcctgcaccgtttcatccaagtaccctgacccagcactcatcttccctggcattctctgttatccaccagctcctctgcacacctcagcgtctacttccacgaacttctaaacatcaaaaggtacaatggccaggggtgcggcaggagagtcgggggcagggcagccttcaaatccacactattgaatccacacgatggaaagaagagaaagatggggaaattctccagagatcatgagatgcatccagcgtgttctcatgtgagaggataggaagccaaaactaaatgctatcagccccgcg

SEQ ID NO: 896 - DNA, 608 bp, Homo sapiens
  Genbank Accession No. AL079707
gcctttctggtgaaggaaggttgctatgaaactttttttcttggtggaaatggccaagtttaggcactctgctttttgccttacactaatgcttagaaagctgtcttttcagtggtgttgcagcccccagatgtgtggccaacctctgctgcaaaggaatctcttgctgagtccaggccaccaatcaggcaaatagcccatacatttgatcgttgtaaaccatgaagtcttttcttgcaagacgtttttcttctgctgtggtatcttgcccttaaaaattagttttcattaaaaagaaatttgattgaaaatagaaacatctacagctcagatactgatctctttctagtgggctttgtaaaccacttgactttgctaatggctattctccaatttgttccaataagctaagggcttttcatacacaggacaactccatgtggttgattttactggcatgtcttggtgacgaagagttggccaagtgaatgatgcatcttttacttggagctctccagcctttgtcatagttcccagaccttttttccttgtggtcatccaggaggtgatcaattacatgtgcacagtgctaggacgggaggcagagc

SEQ ID NO: 897 - DNA, 477 bp, Homo sapiens
  Genbank Accession No. AL079769
gcacacgcctgtaatcctagcactttgggaggccgaggcaggtgaattgcctgagctcaggagttcgagaccagcctaggcaacacggtgaaaccccgtctctactaaactacaaaaaattagccgggtgtggtggcatgcacctgtagtcccagctattcgggaggctgaggcaggagaatcgcttgaacccaggaggcagaagttgcagtgagctgagatggcaccactgcactccagcctaggcaacagagtgagactccgtatccaaacaaaaaaaaagtttgaaccatctgcattatgggccttgctccagaagtgtgactggggctttcccagattgaaaagccagttccaaaactctgttaatgaaagaaccaatgcatctgagtggataaatgtttctaaaataaaatagttcttgttaaagtgaaatttgaaaccacatgttaaatcaaaatgatcctttaaattagt

SEQ ID NO: 898 - DNA, 587 bp, Homo sapiens
  Genbank Accession No. AL079949
  misc_feature (1)..(587): n = a or c or g or t
cctgtacccaaagcattctaccacagttctatttgactcccacttgtaataactcctttaaaaaattccatgtttaaccatatgaccctgcttgcttactcatattctccctccctctccccttcctttctctctcttccagaagtcatttgcctggtttgaaatattttgtagggattgcttattatattattttagctgatgaacctcaggacaacgtctacacacacacacatacatacacgcacacaaaatctcagctgttgaagagtgggcttggaatcagacttctgtgtccagtaaaaaactcctgcactgaagtcattgtgacttgagtagttacagactgattccagtgaacttgatctaatttcttttgatctaatgaatgtgtctgcttaccttgnttccttttaattgataagctccaagtagttgctaattttttgacaactttaaatgagtttcattcacttcttttacttaatgntttaagtatagtaccaataatttcattaacctgtnctcaagtggtttagctaccattctgccatttttaatntttatntaatcctatttgctncggc

SEQ ID NO: 899 - DNA, 1730 bp, Homo sapiens
  Genbank Accession No. AL080192
gagatgtttctaacatttaaataagaaaaaaatcaaatcgaagtcagcctgctggaaaagtgatcacatggcagttgcagtaacttgtatggaaagagaaaatgcaatgagcccagttactgcacttgccactaccatgctgtccatggaaggaataatcagcagttcagttgtcacaagccgcccttgaagaaaacgcagcaaaatatcttcattttaaaatattttgctgcgttttcttcaagggcggcttgtgacaacgcagcaaaatattttaaaatgaagatattgcagtccccagagccagtgaaggtttcttttggtaaaatgaaattgtgccattgtcaaagtaccccgtagtgatgagcactgactggttcactggccacattttagttcttcataataataggccacaaaagggctctgtggtttgcctccatgtgcactggcccctccccacccctagggggcactcagtagctgctgagaaggcctgtccacgaggctgttggaacccctccaataaatacttagaggtagtgtatctgatgcttgttttcatggagaaaattgtattggagaacttaaaacatcacgaatatttttaataggatccgcagacacccaaaggagaagcttggtcttttccaggtatttccaacttgagttcaacccaaagcctttgaaaggaatgcattaccacatgaccacatgctgagaccccatggggtctaacacgggacctaagaaagtctctgcagccagatagtacatggtgtctccacaaaactaggcattctggagattgcccagaaagggatgtgaggggaccgttaagatctgtcttgcttatctcatgcactcacattccttcagcctcctggagttcctgataaaaggaagccagggtgttgacattttttagctattgatttcccaatagcttgtggatcagttgtacacccacacttccttctctgcctaattccgtttttctggaaaaagtagtatgcccatgtatgtgtgtttttcttaacacaggtccatgaaagtttggcttcctggtttgatgtctgttgcgtggcctggaaaccagggagcagcaactattgagatggtttctgtgttcagtgaaaaattctatttcattgagacaattttttctttatccacagtaattttttgacactgtcatcatgaaactacccttaggaaaataagattacctgcaaaaaaaaaaagaaatgagttatggaataggaacagttatgtgatgattctgaaactttaacttagagcttcattactttaagaatggaaaacaacctctgagtttgatttcccaaagtttcataaagcccctaagctcatgattttcatcaactctttgcccacatagtcatttacctccacagccgtttgttgtcatagaaggggtggtggtgtttggatttgatttttttcaacttgcagtgagaaataggataggtgacaaaaccttacttgttttcttaagacaattcagtgcttgagcatctctgtcagaaatggaatgaaatactgttagccaattagaattattttatgtattgttattgtgttttgctgatttttatatgaaaatataattattcattcttgatctctggaagcaatcattattatgaggatcattttactttggaaacactttcataataaagataagtattaagaaaaaaaaaaaa

SEQ ID NO: 900 - DNA, 720 bp, Homo sapiens
  Genbank Accession No. AL110368
tttttttttttttttagcttttggacataatttttatttaagcatgggcttttatagcttggttcaccctagagtgcaacctttcagttacacaaatagcattcagagctacagggccattataatgttgctggtgttgtacaacttcatcagaaggtatgaatatgacccgcagaaaaaacaatccacgaagaaaacacaatgaaaaaacaaccactgttttacaaatcactctgttatcacagacaaaaaatggcagttactgttagtaaatcagccacagaacacttaaaaaaagatctttagacaaggaaatgggaacttatttgtgggagatagggtcttcatccacaatttaaagtagaaaatatttcagggtcaagcatttttcttatccacaaaacaacgctaaaccaacatacatttttaaggagtatattaaaggagatacaatatctttacaactatcttcttgaataggtatttcaattaattttctgcagaatataagtagccccaaattcagcagcaaaatattacaacataacaagtaaatacagtttcaatgtgttgtattgcagaagagaatacataaaggacaaacaatgataatttaatcatataaaacatgagacatagctgaaatacagtccacttaaatagctttgtgaccaagaatgttaaatactgggctaaatgccattttaaacataaaatctc

SEQ ID NO: 901 - DNA, 660 bp, Homo sapiens
  Genbank Accession No. AL118633
ctgcaggcagcaaagatggcccaagagaaatccttcggtgacatttcggaacgactgcagctgagggaacaactgcactgtcacaacttttcctggtacctgcacaatgtctacccagagatgtttgttcctgacctgacgcccaccttctatggtgccatcaagaacctcggcaccaaccaatgcctggatgtgggtgagaacaaccgcggggggaagcccctcatcatgtactcctgccacggccttggcggcaaccagtactttgagtacacaactcagagggaccttcgccacaacatcgcaaagcagctgtgtctacatgtcagcaagggtgctctgggccttgggagctgtcacttcactggcaagaatagccaggtccccaaggacgaggaatgggaattggcccaggatcagctcatcaggaactcaggatctggtacctgcctgacatcccaggacaaaaagccagccatggccccctgcaatcccagtgacccccatcagttgtggctctttgtctaggacccagatcatccccagagagagcccccacaagctcctcaggaaacaggattgctgatgtctgggaacctgatcaccagcttctctggaggccgtaaagatggatttctaaaacccactggggtggcaagg

SEQ ID NO: 902 - DNA, 619 bp, Homo sapiens
  Genbank Accession No. AL118746
ctctgaatgccagatccaaacctttgcccaccatctgcttgtcgtgcaacagttgaggcagtaaccaggggagattcacttcctgtcttgtccttccccagggatcacccccctgctgccctctagcagccaaactcagatgagttccattgttaccctaggtgtgcccatctctttggtagggaaggagaaaggtaagaatagccatcagtgaggaaggattcttggagcgaggagccactgtggtttttcctgctatttaagatgttgagaccggataactttagaaagatacctgcacaaacccataaatagtgcttttataaagtttagttcaccggaacctgagttcagtatttgacattagctttttgtccaaagagttgaagcctgctggaggtctttgctcaaataataaataccacatatttccaagtgtgttcaggtataggcactaggtactgtctgtttacttcatgttaggcacattacatgcattggctaatcaaatcctcatcaattacatatgtaataatctaaacttgcctccttgtattataaatggaaataatcctgtttatttaaacgggttttcatgtacctgtagggattaggaaac

SEQ ID NO: 903 - DNA, 459 bp, Homo sapiens
  Genbank Accession No. AL120446
tgctttttaaaagcttatagtttaagtaaaagtaaaatgtaaaaactgattaaacctatacaagtctggcaatgagctctgcatgaggaaatggaaggaggaatattgaaaatgattctaggaaagtgaacgtaagaaaggaaaatgggttttccttttctgatcatgggctctggaaagtattcatggcctttaccagcattcagtataaaccagagataaggacatatgtacttacgtgtgtctgtgagtgtgtgtgtgtctgagtgttattctgaacagcttgtaaatattgtagttgtttaaaatggaaaataaaagctgagttcttttggcaaatatattgcatcaaaaatacagtattgacagtggataaaacactgaggaaataaattttttttcattttgaaaaaaaaaaaaaaaaaaaaaaaaaaaaaaaaaaaaaaaaaaaaaaaaaaa

SEQ ID NO: 904 - DNA, 532 bp, Homo sapiens
  Genbank Accession No. AW000899
  misc_feature (1)..(532): n = a or c or g or t
actattaccatttttacttttattagaattggctcaaaaagaacccaaagagggcaatgctcaaagggaagaaagggatgagaggagagtacacttaactgatttggttgtttagcttgaaggcaatgtccagctgcaggataaacagcatgaattggaaccaaggactcatctccatgtgggggaggggaatgtgaacagaaaacacgatgtcattggcttcaatttcccttggaattgcctcttcaatgtctcggatcttgtcacaatgattgggtccccaaggcacgaaccattttgtcttgtgatggttcttacgggcatccacacatttcaccgacatgtaggacactgccgttgtgggccctggagcaatcaagcctcccaccagaaaggcgatgatttggaacacgagcagaatcccaccaacaatgcacagcttcttggtgctcatgttttctataattgccccagccatttttgcgcccnccctttttcttttctccttgaaataaatgttttagggtgagct

SEQ ID NO: 905 - DNA, 343 bp, Homo sapiens
  Genbank Accession No. AW000952
tgcatgatagttacatcatgttaggcaagtcaactttggaaaacagttttccatcttcagtaaaggggtagaggctgggctgtaatttgaccagtatgtttatgccctcccattcccagggatgcccggaaaaagccttgcatttggatatcagccacagacacggagatactcaaagaagcattgtgcacctgcttccacccccacaggggttaaagggcaggagcccatctctggccgcgtcctctcctggcttctccatgtgtgtgtatggatggagtaagattgtacttgtaaactttaatattccccaacccctagacctgagcctgaatctcacccc

SEQ ID NO: 906 - DNA, 559 bp, Homo sapiens
  Genbank Accession No. AW001002
aaataaatcctttatttttttaaacctatttgaaacctcttaagaaaattccacaataatcaggatttctgtaaatattgtcaatatatatgaacatatttgaaaaactacagttacagtatatttacatttttggaaacttttcttcagggccaagtaacatgttgtatcttcctttttgcttgtgggggcttcaggttattcatggcctctgcctcttctttaggagcagctctctttaacttcactggagtagttccaacaggggacaatggtggcgacttcacagggcctgaaaggacttttcctatgcgttaagtcatggttctgtttagcgtcattattattgggttccgttttattgttcacaggcaaattggaagacaaaattaggggtgaaacactcgaagaggaatttgataattttctaaaggcattactggtaaagcttgcctgcgggggaggcttcagtcgatcattatctccattctctgtctttttcacttttatgcttgtacttgttgaacttccatcaaatacgatgaggggtcttttcctt

SEQ ID NO: 907 - DNA, 513 bp, Homo sapiens
  Genbank Accession No. AW002846
gaggtaaataaaattttcttttaatgaatgacatgttttgagtgccttgccagttagtcgctgaatggatctcatttggtcaaaagcttgtgttttctattatgacattacttaagctaatagagttaaaataatagcatcaaaatttacaaaattatctcctatctgaatgaaaatgcaaatgattctaacttttacttcagtagctctggagtttcaagtctgttcacttaaaaataaaatggccttaattaacttatacttgaactaccacatttctcaaacttaacataaatgtcagacattgccaactagaataccaatatgattttggggggaaattacagaatgattttaactctcacatagaagaaaaaaatgcctgagaataacaaggtaaatataaaaatgaagactgaggcgaaaattggctcccacattatagtcaaagccactgtaatcaaatcaatattttattcatacaggagtagaaaagtagaagacatgaacaga

SEQ ID NO: 908 - DNA, 599 bp, Homo sapiens
  Genbank Accession No. AW002941
  misc_feature (1)..(599): n = a or c or g or t
gaatgcataatgttctttattgaaaatattgggatagcactgcattacatatagtcaatatccataaatgaagggtcacacatttctgaatggacaatactgttttacatagagaacacagcatctggatatgctctcacaattatagtatcatggactaaactaggtcagagtgaagtatatgcaaaatgaccattttgtttttttccattttattaatagcatatggttgcagatggtgtaaatggtaaacgtgatatcatgagacattcctgatatctcacaccaacacattatttaacgagcaggttaaggtgaaactgccagtatgctgttagtcaagagtcctcagtaggagaacttgagtgaaacgtacacccaggctacagatttaaaattttatagcattcatttaaatttgcatggaattaaggagtataataattgttgatctgacaggaggccactggacaatttgttctctttcacaaaatgtctaaaataggagaataatgtaaaggaagtattctaagaattgcttttttaaatgcagatatgtaaatagtacttgttatacattnttcctttcaaaaattacc

SEQ ID NO: 909 - DNA, 512 bp, Homo sapiens
  Genbank Accession No. AW003102
aaagttttaataaacttgactcaatctgcctttattaaaaaaccttacaaaagatgtatttaaatgcttgaaaaaattaactttatgctctatgcacagataaatttctcttactgtacaactaaatatggttatatcctttgtttaaaaaatattttttcccccactaattacacttcgtgtgtagttccacgtcaatgatctttccgctcttctgggaatgtgtcctaagagctgccgggtgggtggaaatagccctacacagcgccactttcttgctcagtcgtgtttattaagattgtttggggtttggggtttttttcctccgttttcgttttctgagacagcgtgctggtaactgtggacccgcccggccggctgaccttcacttgtccttggagcggtccaggctctcgagcacccggttgagacggatgttgagcagtctgacctgcttctccaggtgctccagcttctcctccacgctggggttgctggggttgctggggccg

SEQ ID NO: 910 - DNA, 655 bp, Homo sapiens
  Genbank Accession No. AW003215
  misc_feature (1)..(655): n = a or c or g or t
tccaaagtagatcctttattcaaaatctgtgggggttttttgactgtttttgctgacctgtgacctctcactgaggacggcagtccaggaccacccccagaggggttcaaagacctccgaaaccagagaccacccccacatacaggtccatggagagggcctggaccatctggacccccacggtcaggccaagtcccagataatagcaccagatgtttcctgtccgacttttggtctccccaaggcgaccagaggccgagctgcccctacacaggncgcaggggcgaggcagggcgcagcacagcatctcaggtgtccatctcgccggcggcgggcccagcggaccctcggggcccagagtcagagagcggagatgagcgagcgcagggagctctggctggaggcactcagaggccggtagcccgcggcagaaccctcagcctggggtccccgggggagcagggcaaggccacccctcggggctgttggtaccacacagcccagcttctcctggggcccctggaagcccccagcgccgggggcccttttcccggagctagcagacagctcccccaatcgcggccggcggagccccaggcctggggctgcagcctacgttggccccgtcgaggggcgcccngcgggtctggccgag

SEQ ID NO: 911 - DNA, 773 bp, Homo sapiens
  Genbank Accession No. AW003286
tttttttttttttttttttttttttttttttttttttttttgcctctgctttcatttttatggttattcggggaaggactttttgaccacccggagaaggcaaaacttcagccatttgggtttttttccccttggccttcccccctttcccaggaaggccgacttgttcattttgtttttccttggcttcaacagcccccaatttttcaataaagggagccaagtcttttttccacaaatctgagggactctttttttttaagggggccagctcttggtctttttcatttcttagccggcaaaggtcatcttttttttccttggttaaataccaaaggggcatatcaagaaaatagttgaagggtggcccaaaatctgttacggagtcactcttttcagtttccttttcgggggcactctcttcattttcttcttcatctggaaccttttgctgggcttttttccaggccttcacaggatccgaatcatatcccctctgaatcaaaactttaattaattctttcttaggcttattttcaaggattattttgccatctattttctctaagaaaaagcgagcctgattattcagtttagcagattcagcaccaagcattcctaggagccattcttttcttaatccataatatttaaggctgaggtcaaaaaaaggctcttagaaatcccacaccgggtcatatttctttaaaccgcctacgtgtcaaaaagcaccatagagttgatggggagactagtttggagtttgaaaactt

SEQ ID NO: 912 - DNA, 612 bp, Homo sapiens
  Genbank Accession No. AW003362
  misc_feature (1)..(612): n = a or c or g or t
agatttttagcatctttatttgagaagtcaattctgcagatgggtaacaattccaagtgttgatatatctcaacctttctatacagaaaataacaaaactcaaccagccagcctccccacatatgcttccaaccacatctggagtgtccaccatcagtccccttggctactttcaaaccagagctcaaatgcagaccgttttccttaggaatcattcccctgacccaggttttcagagttctttttccaggacagaattatagccccaggtgaagactaggtggatataggacaagaaccatcctaggcctggctcacagccaaagtccatcatccattttcagcactgaagagcaagatcttcaccaattcttgtttttgtagcccccatccagggacagcaccactgaaagtttgcaagacagctgggttcagtgaagtgtttgaaaacagaatatagcaccattggaaaacaaaggcctacagccacacttgatcacctncacgttagacagataggaattaggatcaggaacacagatcagtacagaaggccagaacaaaacctttggctaatatataaaaccagcagtgctccaaggcagattcagc

SEQ ID NO: 913 - DNA, 707 bp, Homo sapiens
  Genbank Accession No. AW003626
tttttttttttaagggtatctgacagcaatagatttattaagtatccccgaaaatataaacacaaaccagtaaaaaacaaaaccgtaaaacgtcaggcctggagctgcaataagacagagacaggagcagctcacacgtggcctaggtggggaggacgaggccataaatactgcaggagggcggcaagggagccctagggcgaggggaaagcagggtgtcggcagcaagatggctccgggggtttagacactgctggcttcggccccggccgccacctgcctctcactccagctgcgagcagcttcacttggggccctgggcctccgactcctcctcgtcgtcttcgtacatctcgccctcttcctcggccgtggcgtcctggtactgctggtactcggacaccaggtcgttcatgttgctctcggcctcggtgaactccatctcgtccatgccctcgcccgtgtaccagtgcaggaaggccttgcgccggaacatggccgtgaactgctcggagatgcgcttgaacagctcctggatggccgtgctgttcccgatgaaggtggaggacatcttgaggccgcggggcgggatgtcacacacggccaccttcacgttgttgggatccactccacgaagtagctgctggtcttgctctggatgggcagcaatctgctcgtccaccctccttcatgggacatgcgggccc

SEQ ID NO: 914 - DNA, 426 bp, Homo sapiens
  Genbank Accession No. AW005418
  misc_feature (1)..(426): n = a or c or g or t
ctctggtttctcaagcttttcatgctttttagactcctttgcttttttaaggggaacattccccacctgcagctcgtcctccagctgagaggcagtaggccggctgaggtcatacttctcctcatactcattactaagaattttgtcctgggccttctttttgggaggtttctcctttgctggcttgggaggacctggcaccacatttgggtctcggtggccatgttcccgcctgtccatgcggttgtcccggaaacggcctgggccagcagcccttgtgctgggttctgagatggtggtgggaggggcatttgtgaagctctccaagctggtggccttgctgggcctcctggttgtctgtggcctctccctgtgctgatccttccgggatggagggtaaagattctctgaaactgagggtctncc

SEQ ID NO: 915 - DNA, 693 bp, Homo sapiens
  Genbank Accession No. AW005814
  misc_feature (1)..(693): n = a or c or g or t
aaagggcgaagatttcattttattccactgccttcaggggcctgctagaggaggcccagttggtacagtaatacttattcaccaagctggtcatcgacgaaattgaggatgtcctggccatcctgctgcaggtgatggtgaaggatctgagaatgcggctgctgatggggggtcagaatgtgcataaagggggcaggtgggtaggcagcanctgtggccggattgatggggcccccacttcctagggctgaaggcaagttgaaggaagcagcaggagtaccggaatgaaaaccttgtttctcaaaggactgctgggttttggagtacacagaacccgagatatctggcacgcccgtgttactggaggtgactgaaacaccagtgttgtatccatgagacccatatccactcggctgttggaaaggggtggccgatgcattcacactgacattcacaccatgctgcttggaagaggtaggagccacagggaacacagcaggcccatactggaaagtgctggggaggccccggacccctgtatagtatggcaggctggtgtaaactgtaccaggaaggcagcgcggggttcaagaatgtctgctgcgttgtatggggagtctgcctctggttctgttggggttggcccaaagtgtgggccggcctggggaagggctttcncacccctcggccgaa

SEQ ID NO: 916 - DNA, 548 bp, Homo sapiens
  Genbank Accession No. AW006235
  misc_feature (1)..(548): n = a or c or g or t
catagaccaaaatagagatttttatttccaaacacaaagcagatacatttttaaaaacatgaaacaacagcaaaaacgtcaaaccatcttttagaacactgctacttccaacttgcacaaaaggaaggggaggaaaacgtcaatgcaactttaaaatatagcactaagaagaaactccggggtcctggtgttcctccctggatggcggggaaggctccattagctttggacttgatatgaaccgagataacacacacatgttccgagacagtcgtttggctccaatactgcttgccttcccagaaagcttaatttattccaaatgcatgttttaccatcacaaataatatgacaagagtagatatggtccctctgcgtattgtttacataatagaatatttaaaacaatggaatgtgtttgtctttgacatcaaaaatcatttatgcagcatctacatgcacatatacacacnacagtgtgaacgcatacacaaacacacacacacagacacacacacacacacacacacacacnccatgccattgct

SEQ ID NO: 917 - DNA, 605 bp, Homo sapiens
  Genbank Accession No. AW006352
  misc_feature (1)..(605): n = a or c or g or t
tgaaacaaacgccgggtttaatgtagggcacaggcaccccggagaagtcagctccgtgggaaccgtgggctcagagcacccaggtcatggtggggcagggccaggcctcacctggggaggcccagaaagggagggccacactcaaggtccagggcaagtccacgtgcagacggagccctgcagcccacactgctgttgccaggtgtggctgcgcgggacactcctcggngacaagggcagcagtccagagcacaggaaggaaatgtagcttctcagtgctggggtgcaaggctgaggggccgatgggggacaatggccaccaccaggaggcagcccgggctcacagaccatcttttgccagcctgtacacccgcttcaccctggcatagggccccagggagtcctcaaacacaaaatcccagagcaccttcacccaggagtggtgctgcggcaggtggtcgtagtactcgggcgcgatcttccgcaccagcgggaggttgtagccccggatgctggggaagtcgtggtgctcacgtgtagcccacattgaagggatcagttggaggcccatagtaggagtggtctgtggccctgaggaacatgta

SEQ ID NO: 918 - DNA, 513 bp, Homo sapiens
  Genbank Accession No. AW006499
  misc_feature (1)..(513): n = a or c or g or t
tccgcaaaagcataaaaaagtttattggagcatcacagccggtgttgcgggtattgctgagtcgtgggggagggaggccgatcccgccggccgtaggggcccctaaagtgcactcggtgcggcaaggatggggtgttgcatagagagtcaggccggccgctctaactcggccctccggcctctcggcccagctaagccagaccagcctcccggccgcccggcgccctgngctcgccgctgctcgggctcacgaaaacggcgggcgcacgcgcctgccgcgccagcgtgggctgtcggccccggccccgcggggcggccagagcggcgctgcccaggcgcgtctgcgccactggaatctcgtccacggactctgccgacgccgagtggtaggcgccggcagggccagcggcgtgcacagggctggcgtccgcggaatccgtcgacgagctggagcggcggctgggggccctaggccccgacgccggatccgaggtctcagacgttcgcacttta

SEQ ID NO: 919 - DNA, 228 bp, Homo sapiens
  Genbank Accession No. AW006898
aacagtgagatccacctttattgaaacatcacacggcagcatcagggctcccacacctcacagggcagcaggcagttcacaggacagcaggcagttcacagggctttgggggcctcacagggcagcaggtggttcacagggcttcggggggcctcacagggcttcggggggcctcacagggctgcagggggttcacagagcttcaggggcctcacagagcttcagggg

SEQ ID NO: 920 - DNA, 562 bp, Homo sapiens
  Genbank Accession No. AW006998
tttttgtggacagtatttattgggcacgcctactctgactgaaggcattttggacttgctaggacagtgataagggccttgggtacaaaatgctcctgattctggtgtagctccatggcgagtcagaacactgaacaggaatatgaagccaagctggccccatctgttggtggagagccaacaagcgggggcccatctggttcttcacctgatccaaatccagattccagcgaggttttggacaggcacgaggaccaagccatgagccaagatccaggctcccaagataactcaccaccagaagaccgaaaccaacgcgtggtcaacgtggaagacaaccacaacctttttaggctctccttcccaagaaagctttggacgattgtggaggaagacacattcaagtctgtgagctggaacgatgatggagacgccgtgatcatcgacaaggatctcttccagagggaggttcttcaacggaaaggtgcagagaggatcttcaaaacagacaacttgacgagtttcattcgccagctgaacctctatggattctggaatacat

SEQ ID NO: 921 - DNA, 523 bp, Homo sapiens
  Genbank Accession No. AW007080
taaaacaaaacattttatttaatgcagaaattctaaggtacaaaaacattttgtaaatgtcagctgtgatctactttcacctagttacagagttatgtacaaatcaagtcattaacattttcaatgtcaaaaatacagcacgctgttaagagttctgtcagtgctcattatcccactagatcccacaaagggcaaactcaaagatgaaacaaaggcaacgccatcaataaccaccatattccacaggctttctcccctaggacgtactaacagggagtttccacagggaaaaattctcttttaaaaaattaacagtaaaaataggagttacttactatctagatgaacacaattggttttcacaaaagcttttgctgctgtctggactcaccatgcttttttcttgagagaaacataccaaactttttgttgttgttgttgagacggagtttcgctcttgttgcccaggctagagtgcaagactccatctcaaaaaaaaaaaaaatgaaattgttcccagcat

SEQ ID NO: 922 - DNA, 552 bp, Homo sapiens
  Genbank Accession No. AW007289
  misc_feature (1)..(552): n = a or c or g or t
tggaatggtagatgctcatttatgtaaaatcataataaatgttacacaaactgttagaataaaaaaataccttttttgagggggaggaggtccccagcctgctgctgggtagtgagagggggttagcaccattagggcgcagggggcgggagctccgccacagcccgtggtaggcactgaagtctgtcggtcggtctgtgcatcctggcgcagtcagcggcgggcaacccgctgatggcctctggagggggcgccgtggctgggcggagagcacgagcggcagcactgggtgcggatggtgggcagctggcagcggcccagtaggcgcagcgtctcgcagaacccgaaggacaggcggtcccgctcacagcggggaggctcgacgggctcacaatcctcngtgccacacggccgggagctctcangccaggcctcgntgccacactggtcactgtcttcctcnggcagccctgntctggtgttgacacacttgaccaggcgccgctggacaccaccaccacatggggctgagcacttggtcccaaggcccca

SEQ ID NO: 923 - DNA, 424 bp, Homo sapiens
  Genbank Accession No. AW007442
ttttttttgcacggtgtttctttaatggaaagacagccaccgacctcaaaagcagcccctccttgcgctggaccagaaggataaggggagacctaaccaccagtgggccagtgggggtgaggggcttctaggaaaaccggtgtctgggactctggcggttgatggtgtcatctgcgcgggatgctgggcctccaacctcccaacctcctccgggacagtacaggtttgggggcaaggcctgagcagggcaggctggggagaccgctgtccctggggttttgtgggcaggggctgggtgcaggccggacagacagaaagcagtcccagctcaaggcagaaggccagagggtgtggagtgaaagggacaggcgaagccaggttcggagagatggagggaacaggccaccaagctcagaagcgagaa

SEQ ID NO: 924 - DNA, 624 bp, Homo sapiens
  Genbank Accession No. AW007566
ttttttttcttttctataaaacttcattttgtaatttttttccaagaagtagtaagggggaaatattgcaattatgtaaaggtaaggaacaatggtgtataaaaataatttaagcacaatattaataacaaagcaactttttttcaaggaaaactagtaggtcatcttgcccaagatttttccaaaggtattaaatatattttcaataacagtacatacaaatacacatacacaaatataccacacagacacatgtgcacatacatgcacacacacacacacacacacacacacacacacacacacatatatatatatacagctcaagtatttttttggtgtgcattctagctaatccacatagctaaagtgaaaaaacactgaaaagatcaatgcctgagtaaccttaaatttgaacaaactatgcattggatgtgaatttttggaggcatgctaagatttcccttctcaatttcattagctactacccagtgttctgtggttcttatccttaaaaaaatcaaagtgtgcctttcagatctgctcacggtgtggtgatgattattatggtggcgtcaatttgggaacacttgccctctcttgctcctactgcaccttatggat

SEQ ID NO: 925 - DNA, 237 bp, Homo sapiens
  Genbank Accession No. AW007586
ttttttttaagactggacttgctttatattaaatttgtaaaagtgtgcactggcagcagcctgggcggggctggggtggagcccggggtctgcttgggcctgagcgctcaccccagctggggacaggccccgtggttttcaggcacaagacggtagcccggcctccagcaaccctaaacagctgggctgctgccctcttcctcctcctcagcccagagggtctcccaggaccctgag

SEQ ID NO: 926 - DNA, 544 bp, Homo sapiens
  Genbank Accession No. AW007803
ttttttggctcacaactttaattgattgctttccctccactgggcccaccgggtcggcttacatagctcatagctcagtgctgctgaaatagacccagggcaagaaaggtatgaacaaccagtgaatgccactggagcataaatgttcacaaaattgtagagaaggggtgacaagaagcaagcagtggggcagggagtgtcactgatgtccgaaaccccgggtcagaccaacacgcagcacagccactcggccagagagagctgaaccatgccatccttgtcttcgtccagaaggctgaatagtttgaagagggtctccaggcggatcatacaagccacgaagctgtcaaagttgatgccaagcttgctgcacgcataccgcagggcaatggtctgctgcacctggctgttgagggtgaaacctgccttcctgagggctgtcctcatctcgtgggcatcgatggtgcccgagtggttataatcagtttcccaatagatctcctaaagcaggaaagaaatcccaagtagaaaacaaccattcacg

SEQ ID NO: 927 - DNA, 211 bp, Homo sapiens
  Genbank Accession No. AW007983
tttttttttttttttttttttttttgatgcaacattgcttttattgggggttaggaacatatgacaaagtcacataaaatgtcaacaaagtcacactttgggcttggctgctctttaaaaaaaaaaaaaaaccctgtttatttatgaactcactcaatgaaaactatgtgaaatgtggccaacaattatcatgcttaaaacaggacggcca

SEQ ID NO: 928 - DNA, 556 bp, Homo sapiens
  Genbank Accession No. AW008322
ccaagaacttccttattctctttattcacacctgcacaacccctgcaaggggaaaggccaagagccaaggacccacacacactccccaggcacctacatacatgcatgcagagaatacatgttccctgcctcacagacacatggtcacacatggacacagatgtacacattacacacgttccttgagcagaactccaactctggggtgaaatcagaggtacaagcacctttcagctgcaaatttgaaatacagggtctcacagaaatgggctccaaacagaacttccagctgagatccaaccatagggatctactgtcctgcctggtttctatccacaccagcaagacagaattataggtggaatctgccgaagccctcctgggtcctctacaggtttggagctcctggacgcctgtccactggaatcactgaagccaagaacccaggctttggggatccatccttcccaccccgtctaacctcaccagagcccagtgcagggcccagccaccatcccaggaagaaagatcccaagaccccgcacagtacctgttc

SEQ ID NO: 929 - DNA, 653 bp, Homo sapiens
  Genbank Accession No. AW009505
ttagactaataagccaagagctttattgatgcagcaggcactttacaatgagcccaagagtgtccaccttctctgggaagacaggatgtctgtacaaactcttgggtttttttccacttcaaaaacacaagctctcccgtttaccacagcccttggatctgcacctgcccaaaccatccctcccccagtgcacacaggtgcatctgaccaacaccagccgccacgctggtagaccgtcaaaatgtcagttctgcagtactcggagacaaaggcatagactatcagatcctaaacaggatttaggaaacagacgattttcccctccaccttgaaaataaaatacatttcagcagatacatgtcctgaaatagtttacttgggagttcctaggaagatggtccattgtcaatcccttcttcaccagcctgagcatccagaattcttctcaaggtaacatgagtctttatattttttttaaacagtctttcttgctgtaagaactcttataatggagcctagtcctcctactgctaaggcctttgccgcaggagcccgtccacctcgctcgggtccgggcctggctccggcgtcgacgccgccggctgctgctgctcgtccacaaatgtgttctcgtcaaattcgtcgatgtccac

SEQ ID NO: 930 - DNA, 361 bp, Homo sapiens
  Genbank Accession No. AW013949
tttttttttttttttctgtacaaacacaaaagaatccattttcagaaaaataaattactaaggggagaggaagaaagggtccactttgcttttctcaataaatatgcaattctgctcacctaagacttgaaaggtaattatctgggggtgggattctaacatcagggtccacgaaggtgattctaaacagagctgcagccccagcgccttgtcaggggagcccccaacccttccagagctgccccgttggcctcttccaagcaggtcagaacacccgtgtggtgagattccaaaaaaaaaaaagtgtccttgtgcccaaagtctcaggtgcttggagtgtggctagaaacagctcttttgg

SEQ ID NO: 931 - DNA, 526 bp, Homo sapiens
  Genbank Accession No. AW014155
tttttttttttttttttcaatgccagaaaacctttatttccaccgagacctctcatccaattctcttctttccgggaactttttcccttccctactccaggtcgtaccctggccactcctttccttttggctggccaatgtctcctctgtaggctccagaaggctctcagggatgcaggcggcctcctgcagggttgagttgcaatgggaacaaagacagctgtggtcccatagcaccctcatctggtgacatcctgctactgacagtcaaaagaagccttcccagatgaaattttagtcctctgcgcagccatgctcttcttccagcaaaagagccatgtgcagtcgggtctgctccccatgggggctttgatgtgggcccagcagtggatcagccttccagacacgctcaactctgcacactcttcctgccgcctcaggctttccaggaccctccagagccttatcagagtccttaccctcagggctactgataccttgctgggtgaccttggacagattcact

SEQ ID NO: 932 - DNA, 402 bp, Homo sapiens
  Genbank Accession No. AW014647
tttttttttttttttttaccacacatcttctttattaatgcattgacaatcagtgaagacaatgaaaacccaccacttttgtccgtgaactgagaaagaaaatggcaatgtcatatggcattaatgatgcatgagatctatgggtgtagtgtcacgtctaggcgtgtagtaatccagtcttcggccttactccagggagaaagattcagctttgttactttccagtcactctctcccgtaacacagcaccaagaccgtttaaagcacttaattaattcacttcagcttcgctggagaggtctcagggttcccgagactccattacataatatctttcacaaagtctattcccagctcgaatggaagatggattctcatccagtgtgcggaggcctcgtgccg

SEQ ID NO: 933 - DNA, 383 bp, Homo sapiens
  Genbank Accession No. AW014764
tttttttttttttttttgactcctccctcctcatttattttggaatgtgctagaaacagcttgaaacatccctttaatagcttcctggacaaaggtcaggtccaaaaacacggctattgaccaggaggtggcaggcccgctggttctggcattcgtccagcaccttctggaaggtggtggctgccacacaggttaagctgtcttccctctgggaggcaggcttctgggaactacacatttggtaatcttgcccataaaatgccgattgggcacttatcgtagaatgccgagggcactgtagattcaaatagtccccatcacaggcataggtggggtggttttgcaggagtttggttaggtaaccagagaagtcggtgagcgct

SEQ ID NO: 934 - DNA, 570 bp, Homo sapiens
  Genbank Accession No. AW015571
tttttttttttttttttagggataatgcttttatattagtttttctataacaagaaaaatcagctttgagatttttatcatttttttccttagaaaagaataaaaaataaaggcacccggaacttcccccacaggcctgaagaacaaaggtgtctcctaggtgcagctgggtccttcctccctggctcagcccagccccatcacctctgcttcactcctgccccaaggccccagcagcacccagggggctctcccatcctgcctccactgggcttgcccattggaaaagtgcctgtgtcctgccagggcgtggcagggagggactcttagcagagtgactgcccagcacctggaggagcagggtgggccaggccaggccagcagtcctgaaggctcctgtccccataggatgggaaaggaataaaagccagcttttgtgagttccagagggtggcaggcacctggccacagagcatggatacccttgtgtcttctccagggaacggacggacagatggacagggcagacggcgagctgctatggctgattctggctggggcaagagctgt

SEQ ID NO: 935 - DNA, 438 bp, Homo sapiens
  Genbank Accession No. AW016235
ttttttttttttttgttgggacaggaaacacatttaaagagagcacagtggggtgcgccaagccctgtgctttggaaccgcatcacagcgcccctcacaacagccctgtgaggtaggtgaaggagcccacttcccacatgcagacactgaaggctcaacagctcccctaggcctcagggttcctgcggggtgggcaggggtccagcccacgggtctgaccccaggtcagcggcgtccatcagtcagagggcgggtctctactcaaggggaggccccgggtccagagtctctgggtccagcctgtcccgtgggaataggtgcagggtgtccccgtggctgtggagggatttctagctggagaggggctggggtcccacattccaggtcccttcccacggtagcatccaggtgatggcttccgcccaaaccaggaaggag

SEQ ID NO: 936 - DNA, 327 bp, Homo sapiens
  Genbank Accession No. AW016780
tttttttttttttttttgcagttttcagacgcttttactgtaccttataaccaagatcgggtgaggtgtgcaaaccaagggccctgtcccctccaaaccagcagagcccggggcatgaggatggcaagcgaagtgacaacataaacacaggtgtctccatcatcaaggatgggagtggaacggacagcacgggccatgtcacccccagagcattcgtcagttgtcaagtccaaagctaagaaatcagttcataaatgttttttgatttgcatgttggctcaagccctctttttaagtccaaggaggcagtccacattaagtgtgcag

SEQ ID NO: 937 - DNA, 548 bp, Homo sapiens
  Genbank Accession No. AW020116
gcacgagcactttctgattactcatgataaactgacatggctaactgcaagaattaaatcttctatctgagagtaataatttatgatgactcagtggtgccagagtaaagtttctaaaataacattcctctcacttgtaccccactaaaagtattagactacacattacattgaagttaaacacaaaattatcagtgttttagaaacatgagtccggactgtgtaagtaaaagtacaaacattatttccaccataaagtatgtattgaaatcaagttgtctctgtgtacagaatacatacttattcccatttttaagcatttgcttctgttttccctacctagaatgtcagatgtttttcagttatctccccatttgtcaaagttgacctcaagataacatttttcattaaagcatctgagatctaagaacacaattattattctaacaatgattattagctcattcacttattttgataactaatgatcacagctattatactactttctcgttattttgtgtgcatgcctcatttccctgacttaa

SEQ ID NO: 938 - DNA, 531 bp, Homo sapiens
  Genbank Accession No. AW021108
gcacgagatttttggatatgccttttttggaagagacttagactttatccttattgttgttagtgttgttaatattcgttgcttcagcccacggtgccttggtctctccacaatcaaatggaggatcccccaagcagcttcattacagagtgatattgggaaagtgagatcctctcaccattttgccaagatactctaaaatgacatccaagtttaccagtagaaagacacaggatgcacagaatgggcatgaccttcagctcacgagcacacctggagaaattcagaaccaggttctgaatcatcacgattgccttttgcatgaaaacatcggctggtgatgtgacttctcttcaggccatgagcctaacaccctgccggttttcatgcccgctgcagtaatggacgtttgtgtgaagaaatgaactgtggagtacaaaatgctttgagtctttccgattgctcattaattcacttttttgttacttctttccaaaatggaagtgctgaagccatggtctttctgcccct

SEQ ID NO: 939 - DNA, 580 bp, Homo sapiens
  Genbank Accession No. AW021169
gcacgagccgctatttaaattcccacaatgcaaaactgttagaccagtaattgtgctactgaaattgtcacaaaacgttattccttgatttggtttttaaattttgcttttgtgtgtgtgtctttaaacaggtaatgtgtatttaagtgttgtctaaacagttgatttttactttagaaaagatcatcttcaactgtttattgacttctgagttatatagttcatgccctgccaaggcattgttcgactccatgatactaaaacataatgaaagaaacaaactccagtatggagaagagaaagtttaattatttggttccatctagaaaagcaacaacttaaaggaatccttcactaggattgtcttatcacctttattagataaatcatgaagtgtccctgtgaaattgaagtgaaactatctctgtaggacttaagagaatagctaaaaggtgtgacttgccttattgaactgatactggcatatctgactgtaagcagtaggttgaagatatcattttatgaatgtggagaattctacattgaaacagaaaatacctgggaatgaagattaaaaatg

SEQ ID NO: 940 - DNA, 320 bp, Homo sapiens
  Genbank Accession No. AW021977
  misc_feature (1)..(320): n = a or c or g or t
tctaattgttgatttcagtacaagattttctaaatcagttgctacaaaaactgattggtttttgtcacttcatctcttcactaatggagatagctttacactttctgctttaatagatttaagtggacccaaatatttactaaaattgctagtttaccgttcagaagtataatagaaataatctttagttgctcttttctaaccattgtaattcttcccttcttccctccacctttccttcattgaataaacctctgttcaaagaaaaaaaaaaaaaaaaaaaaaaaaaaaaaaaaaaaaaaaaaaacctcgnggggggg

SEQ ID NO: 941 - DNA, 581 bp, Homo sapiens
  Genbank Accession No. AW022607
  misc_feature (1)..(581): n = a or c or g or t
ngcacgaggaggtcctttaggaagactctcaaaggcaaatccctgatcccccgccccacccttagccctgccctctcaccagagcaaaattcactggggacttttcccaccacacatggaaatctgtccactcggaatacctctgttttccatttcaaattgtagggggaggggatggaacacttccagtgatggtaagagatctgttatgaaacgaaacaccccccgtgttaataacttggtctgaaatctgtttttatgagccgggccccctgtgcctctagtatacttgtattgactctcatagttacccttttagttttactgtgttctgtgaaaatttgtaattggttgagaatcactgtgggcgtccattcttattcaactaaatctccacaggttttttgagctggtgtggattagtttaactcttgtattcaaccattagtgctaccaccttctcacattacaatacaattactggaagcaagtactgcatttcctatgcaacaaaaaaggaaaaataaaaaattgctaatgctatgaaaaaaaaaaaaaaaaaaaactcgagggggggcccg

SEQ ID NO: 942 - DNA, 505 bp, Homo sapiens
  Genbank Accession No. AW022660
gcacgagtcttgaatgaggcaatttcaagatatttgtaaaagaacagtaaacattggtaagaatgagctttcaactcataggcttatttccaatttaattgaccatactggatacttaggtcaaatttctgttctctcttccccaaataatattaaagtattatttgaactttttaagatgaggcagttcccctgaaaaagttaatgcagctctccatcagaatccactcttctagggatatgaaaatctcttaacacccaccctacatacacagacacacacacacacacacacacacacacacacacacacattcaccctaaggatccaatggaatactgaaaagaaatcacttccttgaaaattttattaaaaaacaaacaaacaaacaaaaagcctgtccacccttgagaatccttcctctccttggaacgtcaatgtttgtgtagatgaaaccatctcatgctctgtggctccagggtttctgttactattttatgcact

SEQ ID NO: 943 - DNA, 275 bp, Homo sapiens
  Genbank Accession No. AW023188
gcacgagatcatatactgagagaaaagaaaaggatatttgacggataaatgttgcttccatcttgttaaagagtctttaccattccttttataaaaatctcagtattaagagtcatggtctctttagaacattgccttaaagttatctgtaacaataagcattcctatgaactattagttttaaatagagtgaaaagatgtttctttcaaataatttttctttgttgccaaattcccaaactttctttcagtcaaaaaaaaaaaaaaaaaaaaaa

SEQ ID NO: 944 - DNA, 491 bp, Homo sapiens
  Genbank Accession No. AW024276
tttcatatgctgctttatttctgtaaggatacactgaaacgttagatgataatagctaatgacagaatgtagaaatgaggcatcagcttctctaaccactcctacaagaatgttagtatgtattgtcattacatgtttacttttgatattgtctcattatactatgtcatataataatgtagaatacagtaagtaggtgatcctgcatttcaggtaagcggtaggtggaaatccagatttcctcttgaggaaaagtcctaggaatcacaacagaagggactttgcagtcctcattaacacatggacaaagagcagacaactactacgttacaagggattcaactagtcactgttgtgaaatgtcatatccatgttgatgacagccctggcgcctgctcaactccccctctagagttttgcggttacttccgtaggatgaatttcagcactgcaggaacatctgagggggctaaaatattttcatgcaagtt

SEQ ID NO: 945 - DNA, 550 bp, Homo sapiens
  Genbank Accession No. AW024285
cattcccaagtatagactttatgttttatttattccattgaaaatcccaagttccttcatggcaaccctccctctgccctcacaccccagcaggtccccgcaggccagggcccatgccccacctgcccacgggtctggcccccaggccaccaggggcccgctgcgtcctgtctcacacacaaggggtttaactcaacgctatgtacattcacagttccgaatatccgccaactctaagtcgccacgaagagaaaagagaatcaggaggaacaaacatccattcaaagtctgtttatcagagatttttttttctgaaaatgcacagtggcatttcattcaaaaaacccttcatctgcagacctgcggaagggaggtggcctgggtcccttccctcggaatatcttagtttatttacctccttcattggccatttgcaggctcttctccttgaaaaatgaatctttacgcattctccaattataaaatcagtgactgttagctaccaaaggctgcactaggatttcttctggtccaacacgccaagagccct

SEQ ID NO: 946 - DNA, 519 bp, Homo sapiens
  Genbank Accession No. AW024434
ttttttttttttttttttgaagcttacactgaaaatttattggagggctttgaaacagctcatgtaatggaaagctcttaaaaactaggtttaaaaggggcaaaaaccagggcaacttcagggatccaggtagcaggaaggaatcggtagcctctttggtatggccactgtggtggtagacactgtctaccttgtttgctgagtcttctggctttcttccactcttcctgctcttggacatcaaactccaggttcttcagcctttggaatctaggacttgcaccagtgggttggttgccaggggctcttgggcctttggccacaaactgaaggctggctgcactgtcagcttccccagttttgaggtttttgaactcaggctgagccactactggcttctctctaacccagcttgcagacggcctattgtgcgacttcgccttctaactgtgggagccagttctccctaataacctccctttcatatatacatatatcctactaattctgtccctctgg

SEQ ID NO: 947 - DNA, 229 bp, Homo sapiens
  Genbank Accession No. AW024474
ttttttttttatgattctggaaatttattaggtttttttttctccattaaggaagctacatgcaaaagatacaacatacagaatatctttaaataacacaactcccagacagggacaggacaatatttgggggggggcattctgtctttgctttgctatgttctatttttaatttttttgttcctctggatgaaatttctgagatgttactaaatgggggatgtggggg

SEQ ID NO: 948 - DNA, 653 bp, Homo sapiens
  Genbank Accession No. AW024795
tttttaagacagttacatgtctttattacataaacatcataatatttctcataggagttggtcttcagtttgcttgttgctttcgcagaatgtcaaatatctatagaaaatgtctaattatttatgaacaaacattcccatccctgccccgcaaaaaatctcattgcctgcaattcctaaccagattcctgagaaaaataataggatttattttatagcatcatacatagattttctttcaagatataaaaaaggacagacttctaaaacatgaatctcctttcgtttacaaagttctataaaaatacattaagtatgttcaaatgtttgttctttcactttatattccagtttaccagaaacaaaaaatggcagtacataaagatatgtaaaccacattaatcttgcagtaatataatgtcaacatcatcatgaacaccttgcagaagcagctctcctggatatgttacaatcttccttcgttttgcagctttaagagttcctaccaatgcttcaaagaggttggcacatttatcatcacgggagaggacccccaatttcacgcttaactttccatcagcattttttgaacccaaacgatgaatattctgcacttagaggttaacctcgtgatccacattcattgctgcctc

SEQ ID NO: 949 - DNA, 520 bp, Homo sapiens
  Genbank Accession No. AW026241
attaaacataatttttatttcatccaaggcaaagctaaatacaattctacaatgcaaaacttgttgtagaggccagactgattatatccgttctgtgctcgaacacaagtcagtgctggctgtgtgggcatctgcgcctcccagaggcactcgcacacctgaggcctcccaaggcctgttgttgcatcatttgatctatagttacataggaaaattgactatgggtattgttgtcatccaagccagaggaataaaccatgcataagatagtcaaaagcactgcatatcaggtgggaggtgggagggtagggactccaacctgggacaaagtaaagtaaagcaagttataggattttcccgagaagtccccgctcctggaactccctactgccagccctctgatggcagctgtctgtgacactgagatgaagtcatggagtgacggaatgcaggagcacggctggtcttctctgcctttgattctttctcagtctccagatgcctcaacaggcatagctca

SEQ ID NO: 950 - DNA, 522 bp, Homo sapiens
  Genbank Accession No. AW026553
tttttttttttgtaatatcaaaatttttattttaaaactcttattgtattatctgttaaaattaatacagtaattaaaaaaattagtggcttaaaacaacatttatctcacagttacatttgggttggaaatttaagcatggcaatagctggatcctctggcccagggtctctcaaaggctgcaatcaagatgtcagaggattgaagagctcttaagctcccaaatgcccagcgataccagcgatacctaggtatgcagtgggccttctgtgagactctgagactagctggcttcaaatgagactcagcacatttccagccatggtggctatggggagagactccttatgctggagaaaagtagagggaaaagtaaaggggacttttgcaccttaggtacaggcgcagccatagtggggtagaacatcaagcgggctcttgaggtccctgattcaaagccttggctcctggacagtaattctggacctgccttgggccagaagggagcccactgtcctgaag

SEQ ID NO: 951 - DNA, 551 bp, Homo sapiens
  Genbank Accession No. AW026659
caacgcctttattaagaaatatcaaaagttgattacaggtccatatgcagttttacaaagttcaagtgaagaagactgtagggatgccatcaatgtgcgtgtctgaagactatggaagcttgtcaaaggggtaaccctacaactcctgtcactttaacaatggtccacagcaatgcttttcccccatttctactaggctaggccattgcacaataccttaagctacttaaaagagttttaatacgttataaatacgtacatatttgtccttctagtttgttaccatccttccctgaaagagcggagctgtttataggaagcacaacatttgagtcccattcactgctgtttgtattacattttcacaaagcctgctttgaaagctggcaaacactgcaagttacatgttaccatattacacatgggaggacccatacacattgttatttttaaatttaacattgaacaaaaaaaaggaggaatcacttaacttggaaacaaaacaccaaagttagtcagtggaatggtcaagagcaggacaagcctgccag

SEQ ID NO: 952 - DNA, 551 bp, Homo sapiens
  Genbank Accession No. AW044663
taaaagctccaagtcattagctttatttttactgaattcagcatgggatgacaaaaatgcattatatcactaccatccattattacatgtagacatttatccttgtattctttatatgtccattttctacattaaatctgttaaccaatactaatttaaattacatgatttcctactaaaaatatgcagttcatataagcaagggcaaataaatcctccttaaaacattttattcctttataattgagaacttaacagtcttaatggctagttcttaaaaaatgtttataggattaagtttatttaagagagcagacaaacaaaacatattgtaaaactagtattttccagaagcaatttccattctcttcctttcttcctgcaaactggtgttttatctttacaagttctctgtcattccataagaaagctgaacagtggttaaaacatccagtttgcttgaattcctgagtgattcagattccagtgagattgagggtcattcataacagttacaaggctggtgtggtaaagggagaacaaaaataaac

SEQ ID NO: 953 - DNA, 541 bp, Homo sapiens
  Genbank Accession No. AW051492
gtaactctgcttttaaggaaaaagggggaaagcgaaattctgcagagtcaggaaacaggtttccttgctagagatagagacagtgagataaaggcatggggcttcccccacaccctgcagctcaaaagtgtgggacaggagtctaaaacttcctgttgttggctggtatttacagctttttagatgatatgtccattttccccaggcactttggggccaaaactcagtatgctgagactcaaaaattgctctcagtagcttcatattttgatttttttttgcaccattcttatctatctattgctcatctgacatctttatatgttatttaaacagtacttatctggagaaatataacagaggtcaagaaagtacatacatacagatacctaaaactcaaaagtccatctcttgttctcccccaatcactaaaactgccccaagcctaaaattaatctgatggttaacattgctaaattaatattagccaataaagttattcaagtctttgaaacttacaattttgcatcatttatttttg

SEQ ID NO: 954 - DNA, 549 bp, Homo sapiens
  Genbank Accession No. AW052142
ggctgtaagagagtcgtatattttcccatatataaatctgctcctataactactgtatatgcacaaatacaatggaaataattatatttccctcaaacataaatctgtaaatacaaccacagcacatttaggtacggttagacatagagcaatatttcctagacatcagtctgtcaatagagccaccagtgcctccaaacagagagttatagagggagttataaataaactctccagatgggaaccggtcagtagaactagatgtaaacatgactccaagctgttctttcttcttcttcttcttcttctttgtaagatattcctgaagcaagcccagtcatataacagggtgcagaggtgtctgggtactggtatttttccccccaggagggtcggatgtcgctggactttgggaaaccgagcaggagtagataggggacagtgcccgctcccaacgcagcccagaagtcccttccttctgtctcctggtggctgagagctcgggcaagtggagaggcctggagagaatgaggtagatgttgccggatc

SEQ ID NO: 955 - DNA, 485 bp, Homo sapiens
  Genbank Accession No. AW052186
catgataactatttttaatcaaatagtaaataattacacaactatacactttgaataaattggatacataatttaaattctacttaacaaattatcagtcaccaaaggttacatttacaatatatctaaatatatagtggatgtattttttcttttttaattacaagctaataattttagcagttgaacagttgaaaattaaaatatttttattgcacttctacatgttggctgggttataatgataaatggtaagaaaaagaaacagaattatatttaatagaagcacctataagattagatatttattcaggaaaaaccagaagtcgtccaactgattgatcatatggttgaaagagacatgaagagcaaaagctaggacttgggagtgtacacaaatggatagctgaatgtgctaatagaaatcaggatatagacttgtaatcgcaactcccaacaagttagggaataaatgtattgtcttg

SEQ ID NO: 956 - DNA, 456 bp, Homo sapiens
  Genbank Accession No. C16443
  misc_feature (1)..(456): n = a or c or g or t
aaaacacctattttgattgatcagttcttttgtatgaatatccacctcstttaaatactctatttttatatatvtbbggstvtgasgataaacatgavtttatatttvactgtcttaaattatatttncataavtgcaaatvtcacttgatataaacaatacaaatctgcatcttacagatgataatttttttmgaagaatgatacagaattaactttaaaaataanvcttttctaatatacacttaantgcaaacatcatttttbhnttttcagtgawttttttthtgacataaaacgttaccaatgtgtgcagcctctccatcatgttttaacatactgtatactctatagcagtattacagtcagtatttcatataattbbbtttgacctaactgttaccatctgactgaggttactctggtatttatctcttsgctgctgaaataataatag

SEQ ID NO: 957 - DNA, 451 bp, Homo sapiens
  Genbank Accession No. C17781
cagtgggtaaggttgggggccactgccagaggctgctgcagtgccctctgggaagtgccagggaccctcagctgcagacccaggggatcccaatcccttatctctgcctgaaaagtggctattgctgcttcgtatcctccagtgtcacaggaatgctgtgcctgagacatcccactttagtttttgttttccaaacctgtcactgactcttcattgtggtgacagatcctctggttcccccattgctcagcctcaggtttattttgagggtaactcagtgtctgactgcccaagtcttttaggggttagttggaccattgtgtaagcttgtttgtatgtctcacctctttctggttggtacttactgtctcacactgctctggcaaacttgtacacacacacacactctctctctctctcacctggctaaggcttttgagttatgaggtaa

SEQ ID NO: 958 - DNA, 1603 bp, Homo sapiens
  Genbank Accession No. D00632
ggccagggatcaggcagcggctcaggcgaccctgagtgtgcccccaccccgccatggcccggctgctgcaggcgtcctgcctgctttccctgctcctggccggcttcgtctcgcagagccggggacaagagaagtcgaagatggactgccatggtggcataagtggcaccatttacgagtacggagccctcaccattgatggggaggagtacatccccttcaagcagtatgctggcaaatacgtcctctttgtcaacgtggccagctactgaggcctgacgggccagtacattgaactgaatgcactacaggaagagcttgcaccattcggtctggtcattctgggctttccctgcaaccaatttggaaaacaggaaccaggagagaactcagagatccttcctaccctcaagtatgtccgaccaggtggaggctttgtccctaatttccagctctttgagaaaggggatgtcaatggagagaaagagcagaaattctacactttcctaaagaactcctgtcctcccacctcggagctcctgggtacatctgaccgcctcttctgggaacccatgaaggttcacgacatccgctggaactttgagaagttcctggtggggccagatggtatacccatcatgcgctggcaccaccggaccacggtcagcaacgtcaagatggacatcctgtcctacatgaggcggcaggcagccctgggggtcaagaggaagtaactgaaggccgtctcatcccatgtccaccatgtaggggagggactttgttcaggaagaaatccgtgtctccaaccacactatctacccatcacagacccctttcctatcactcaaggccccagcctggcacaaatggatgcatacagttctgtgtactgccaggcatgtgggtgtgggtgcatgtgggtgtttacacacatgcctacaggtatgcgtgattgtgtgtgtgtgcatgggtgtacagccacgtgtcctacctatgtgtctttctgggaatgtgtaccatctgtgtgcctgcagctgtgtagtgctggacagtgacaaccctttctctccagttctccactccaatgataatagttcacttacacctaaacccaaaggaaaaaccagctctaggtccaattgttctgctctaactgatacctcaaccttggggccagcatctcccactgcctccaaatattagtaactatgactgacgtccccagaagtttctgggtctaccacactccccaaccccccactcctacttcctgaagggccctcccaaggctacatccccaccccacagttctccctgagagagatcaacctccctagatcaaccaaggcagatgtgacaagcaagggccacggaccccataggcaggggtggcgtcttcatgagggaggggcccaaagcccttgtgggcggacctcccctgagcctgtctgaggggccagcccttagtgcattcaggctaaggcccctgggcagggatgccaccctgctccttcggaggacgtgccctcacccctcactggtccactggcttgagactcaccccgtctgcccagtaaaagcctttctgcagcaaaaaaccccc

SEQ ID NO: 959 - DNA, 466 bp, Homo sapiens
  Genbank Accession No. D00654
cccctttttctgggataagtacatttttggaccaccttgcttattcccttggggactgatcatgattcaccacatttgttctttgcagattattgctcccccagagcggaagtactcagtctggatcgggggctctatcctggcctctctctccaccttccagcagatgtggatcagcaagcctgagtatgatgaggcagggccctccattgtccacaggaagtgcttctaaagtcagaacaggttctccaaggatcccctcgagactactctgttaccagtcatgaaacattaaaacctacaagccttacttctctgtgtggggctcttttttcctgggctatgtctcatacacagtgctaaggacttttcacacattacttttaatccatgcaatagtgctctaaggtaggtgctatcattatacccatattacagatgaggaaattgaggctcagagaagtca

SEQ ID NO: 960 - DNA, 3388 bp, Homo sapiens
  Genbank Accession No. D10667
aattcggagaacctgctacaggaacagctgcaggcagagacagagctgtatgcagaggctgaggagatgcgggtgcggctggcggccaagaagcaggagctggaggagatactgcatgagatggaggcccgcctggaggaggaggaagacaggggccagcagctacaggctgaaaggaagaagatggcccagcagatgctggaccttgaagaacagctggaggaggaggaagctgccaggcagaagctgcaacttgagaaggtcacggctgaggccaagatcaagaaactggaggatgagatcctggtcatggatgatcagaacaataaactatcaaaagaacgaaaactccttgaggagaggattagtgacttaacgacaaatcttgcagaagaggaagaaaaggccaagaatcttaccaagctgaaaaacaagcatgaatctatgatttcagaactggaagtgcggctaaagaaggaagagaagagccgacaggagctggagaagctgaaacggaagctggagggtgatgccagcgacttccacgagcagatcgctgacctccaggcgcagatcgcagagctcaagatgcagctggccaagaaggaggaggagctgcaggcggccctggccaggcttgacgatgaaatcgctcagaagaacaatgccctgaagaagatccgggagctggagggccacatctcagacctccaggaggacctggactcagagcgggccgccaggaacaaggctgaaaagcagaagcgagacctcggcgaggagctggaggccctaaagacagagctggaagacacactggacagcacagccactcagcaggagctcagggccaagagggagcaggaggtgacggtgctgaagaaggccctggatgaagagacgcggtcccatgaggctcaggtccaggagatgaggcagaaacacgcacaggcggtggaggagctcacagagcagcttgagcagttcaagagggccaaggcgaacctagacaagaataagcagacgctggagaaagagaacgcagacctggccggggagctgcgggtcctgggccaggccaagcaggaggtggaacataagaagaagaagctggaggcgcaggtgcaggagctgcagtccaagtgcagcgatggggagcgggcccgggcggagctcaatgacaaagtccacaagctgcagaatgaagttgagagcgtcacagggatgcttaacgaggccgaggggaaggccattaagctggccaaggacgtggcgtccctcagttcccagctccaggacacccaggagttgcttcaagaagaaacccggcagaagctcaacgtgtctacgaagctgcgccagctggaggaggagcggaacagcctgcaagaccagctggacgaggagatggaggccaagcagaacctggagcgccacatctccactctcaacatccagctctccgactcgaagaagaagctgcaggactttgccagcaccgtggaagctctggaagaggggaagaagaggttccagaaggagatcgagaacctcacccagcagtacgaggagaaggcggccgcttatgataaactggaaaagaccaagaacaggcttcagcaggagctggacgacctggttgttgatttggacaaccagcggcaactcgtgtccaacctggaaaagaagcagaggaaatttgatcagttgttagccgaggagaaaaacatctcttccaaatacgcggatgagagggacagagctgaggcagaagccagggagaaggaaaccaaggccctgtccctggctcgggcccttgaagaggccttggaagccaaagaggaactcgagcggaccaacaaaatgctcaaagccgaaatggaagacctggtcagctccaaggatgacgtgggcaagaacgtccatgagctggagaagtccaagcgggccctggagacccagatggaggagatgaagacgcagctggaagagctggaggacgagctgcaagcctcggaggacgccaaactgcggctggaagtcaacatgcaggcgctcaagggccagttcgaaagggatctccaagcccgggacgagcagaatgaggagaagaggaggcaactgcagagacagcttcacgagtatgagacggaactggaagacgagcgaaacgaacgtgccctggcagctgcagcaaagaagaagctggaaggggacctgaaagacctggagcttcaggccgactctgccatcaaggggagggaggaagccatcaagcagctacgcaaactgcaggctcagatgaaggactttcaaagagagctggaagatgcccgtgcctccagagatgagatctttgccacagccaaagagaatgagaagaaagccaagagcttggaagcagacctcatgcagctacaagaggacctcgccgccgctgagagggctcgcaaacaagcggacctcgagaaggaggaactggcagaggagctggccagtagcctgtcgggaaggaacgcactccaggacgagaagcgccgcctggaggcccggatcgcccagctggaggaggagctggaggaggagcagggcaacatggaggccatgagcgaccgggtccgcaaagccacacagcaggccgagcagctcagcaacgagctggccacagagcgcagcacggcccagaagaatgagagtgcccggcagcagctcgagcggcagaacaaggagctccggagcaagctccacgagatggagggggccgtcaagtccaagttcaagtccaccatcgcggcgctggaggccaagattgcacagctggaggagcaggtcgagcaggaggccagagagaaacaggcagccaccaagtcgctgaagcagaaagacaagaagctgaaggaaatcttgctgcaggtggaggacgagcgcaagatggccgagcagtacaaggagcaggcagagaaaggcaatgccagggtcaagcagctcaagaggcagctggaggaggcagaggaggagtcccagcgcatcaacgccaaccgcaggaagctgcagcgggagctggatgaggccacggagagcaacgaggccatgggccgtgaggtgaacgcactcaagagcaagctcagagggccccccccacaggaaacttcgcagtgatgcaccaggcgaggaaacgagacctctttcgttccttctagaaggtctggaggacgtagagttattgaaaatgcagatggttctgaggaggaactggacactcgagacgcagacttcaatggaaccaaggccagtgaataagcaactttctacagttttgcaccacggcaagaaaaccaaaaaccaaaacaaacaaacaaaaaaaacccaacaacaacccgaacaagac

SEQ ID NO: 961 - DNA, 836 bp, Homo sapiens
  Genbank Accession No. D14657
gtgaaacaccctcggctgggaagtcagttcgttctctcctctcctctcttcttgtttgaacatggtgcggactaaagcagacagtgttccaggcacttacagaaaagtggtggctgctcgagcccccagaaaggtgcttggttcttccacctctgccactaattcgacatcagtttcatcgaggaaagctgaaaataaatatgcaggagggaaccccgtttgcgtgcgcccaactcccaagtggcaaaaaggaattggagaattctttaggttgtcccctaaagattctgaaaaagagaatcagattcctgaagaggcaggaagcagtggcttaggaaaagcaaagagaaaagcatgtcctttgcaacctgatcacacaaatgatgaaaaagaatagaactttctcattcatctttgaataacgtctccttgtttaccctggtattctagaatgtaaatttacataaatgtgtttgttccaattagctttgttgaacaggcatttaattaaaaaatttaggtttaaatttagatgttcaaaagtagttgtgaaatttgagaatttgtaagactaattatggtaacttagcttagtattcaatataatgcattgtttggtttcttttaccaaattaagtgtctagttcttgctaaaatcaagtcattgcattgtgttctaattacaagtatgttgtatttgagatttgcttagattgttgtactgctgccatttttattggtgtttgattattggaatggtgccatattgtcactccttctacttgctttaaaaagcagagttagatttttgcacattaaaaaattcagtattaatt

SEQ ID NO: 962 - DNA, 3694 bp, Homo sapiens
  Genbank Accession No. D14664
gctccgggccgcgctgcccgcgctcctgctgccgttgctgggcctcgccgctgctgccgtcgcggactgtccttcatctacttggattcagttccaagacagttgttacatttttctccaagaagccatcaaagtagaaagcatagaggatgtcagaaatcagtgtactgaccatggagcggacatgataagcatacataatgaagaagaaaatgcttttatactggatactttgaaaaagcaatggaaaggcccagatgatatcctactaggcatgttttatgacacagatgatgcgagtttcaagtggtttgataattcaaatatgacatttgataagtggacagaccaagatgatgatgaggatttagttgacacctgtgcttttctgcacatcaagacaggtgaatggaaaaaaggaaattgtgaagtttcttctgtggaaggaacactatgcaaaacagctatcccatacaaaaggaaatatttatcagataaccacattttaatatcagcattggtgattgctagcacggtaattttgacagttttgggagcaatcatttggttcctgtacaaaaaacattctgattctcgtttcaccacagttttttcaaccgcaccccaatcaccttataatgaagactgtgttttggtagttggagaagaaaatgaatatcctgttcaatttgactaagtttttggtaatcttgcactaagacatcaacaaatgccctggcagagataacttgggaaagattttaatataaaacttgacattggatattagagctttaatggtattccttattccagtaacatttttatgtactcatctgctgtgaaaagtctttaggttcattaaaaaaacaggttttagaaatgatcttagatctaatatagtgattttaagcatcccgtcaaaggcagaatctgtcacttgaatgaaggaaagcttaaagcccaagcagataaaaataaaagcccagcctatttgtcttgcctgctgtatcttccctatttagttgacccactttagtttatatgtttattagtaaacatgaaatggggaataagtgattttaagtacatcccatacatttaaatatctttgataattgttatttttttggcagataattcctctagaatgtgtatctttttatgatttagatgaagaaaattttacaacttttaacaccccacaccaattttagtttcattacttttacacacaccattttatcacaaatgactcaagttttaatgaatgtttataaattatttgaaacaaaatatgatcgctgtgtccaggatggcatagagaaagctggcaattaggttaacacttacatattatagtgcccctttaaggatttctctcttgccaccataccttttgtactttcccctatacaagatgtatctcattctcctcaagcatttataaatttttccttcaatgacatgaaaactgtgcaagcaaaaaccgaagaaaaacacttaagtacaactgtagtgacagtgatcaaagttttcagtgcatttattgtacattttaagaaaaaggtgaaaatcatttggggagtaaaaaaatgaaaaagctgaaacgagtaattttcctcaccatcaataaaccaaaaacaggaaagataaagaatgtataaatttcacgtaaattagtcacgtatcacttatcaatggggatacgttctaagaaatgcatagttagggaatcttgtgtgaaaatcagcttgtatttacacaaacccagatggtagagcctattttgtcccaaacctacacagcatgttactgtgctgaatactgcagacaattgtaacacaatatttgtgtatctaaatatagaaaaggtacagtaaaaatatggtctactaaggaaacactgttctatatgtggtccattactgactgaagtatactgtctagaagtctgaggctcaaagaaaagtaatccctcttctgaatccacaccccatcaattatcttactttcttctggggagatagatagatatactatctcactagcttgactaatggcaacaaagttccagcttgtgtagtctctttttattgaccacatgaatcgaaaacactcatcacaattaatggcactatcattaatgagacatgagtaactaaaaagtgatagaaaactattacagtgcggctacatggtactgaaaatgcaggcattacaccagctgttacacaagcacaagcatgctctgtaagagctttacatttctgagattttgtatagtgattgagatgtctattttattattgatagactattactaatgtcaatattgaacactaccctggaattcctgcctggttttcctacccaaattgtaccactccttgaagaactacaggcacagtaaaaaaatatggcgtattatgtgaactaaaagagttctaaaggagttcttaaaggagtggtagaatttgggtaggaaagtgattaagtccaacttaaaaccaacagtctcaaacgtctacaactacaatgtccaatgagccactagccacatgaggctatttaagtaaatttagtttaaaatccagttttcgaattacattagccacattgtcaagtgttcaaatcacaggtggttagtggctactgtactgggcaacatacattatagaacattttcattataggaagttttattgggcagtgctgctcttaaatcctaccttccactcaactcccatacaactttcttttgtacattttgatactttctacctaatggcagctcttccaaaatagctgctttaaactctgatttaattttcaatatttggtttcatttttcaacaggccaagaggcctctggtaatgaagtgctatatatatatatatatgacggagtctcactgtgctgcccaggctacagtgcagtggctcgatcttggctctctccaatctccgccttgcaggttttcaagcaattctcctgcctcagcctccttagtagctgggaccacagacatctgtcaccacacccagctaactttttgtatttttggtagagacggggtttcgccatattgactgggctggtctcaaactcctgacctcaagtgatccacccaccttggtctcccaaagtgctgggattacatgcgtgagccaccacacttggcctacattttttctttatataccagaacatctataacaggcaccttatctactcattagtgaagagataattggattacacaggcaggcttgtttactacatccagaatgtagaaactgctttcttcaacatcttggttctagctagtaataacaatataattctttggcagatattcagaataacattttaaactacattttcttagaaaattgcattcttgtagtgagcagtgtatggtctcttttgttcagaatttaaaactgataaccaatgaaagccttttctcttattcctctaccgtcatttacatgataatctgaagctaatatgacaatatttaaatactaagtggtactagggaactacaagaatactgtaaagcttaagccattgttatcactgtcatttagcatttaataacaaaactatacagaattatgtgcataccaatgaatgttttgtaccatctagttaaattttttaaataaagttttatgggttaagcag

SEQ ID NO: 963 - DNA, 1311 bp, Homo sapiens
  Genbank Accession No. D14686
acctcctgtggccagggcttctatgggctgtggcttatgtctcatgtgtcattctccagggaagcgccgccgagctgctatggacttccctggagccaaggtcattgttccccagctgaagggcagggtgcagcggaggcgtgtggggttgatgtgtgagggggcccccatgcgggcacacagtcccatcctgaacatggagggtaccaagattggtaggtggaccagggaagctgggaaacccttgtctcttcccaggagggtgggggcactggcagggtggtgctgatgcgtggcttatgcttgcttgacaggtactgtgactagtggctgcccctccccctctctgaagaagaatgtggcgatgggttatgtgccctgcgagtacagtcgtccagggacaatgctgctggtagaggtgcggcggaagcagcagatggctgtagtcagcaagatgccctttgtgcccacaaactactataccctcaagtgaagctggctcagggtggggctgtcccttccaggagttttgcccctacaaggggttagtcaagaagctgaggcagaactcactgggggtgggcagttaaggtggaggctgattctaattgtctggttgaggggccacaccacctattccccccacctaactcatgccattccagcttccttcaggaccctgcttctgagtgacggaccagctcacacaatgtcttgtttcagtccatgatcccactgacctactcttgcctgctggagggtaatgagaagctttggttctgccatctctcccactctgccaggtgctggctgtggagcaaaggctcacctttgtggagaggataaaacctkcccaacctacctcaccatggtttttcacattgcaaagggtaataacatgggcagtgcggacttaggctaccccctccagtttgctttccgtaaatgcaaattgtccttactgcaagtcaggaatgattgctgactcacagtagggctgctatgcctgtgtgtaaacttggggatggctgagggaacatagactcactcttccacattcccaagttggtctagtgtgctgcccagtagcaaaccatggcagactcaccacctattctgagttccagggctgctgtagggcagggtgggcttcctcccagacttgccttaccctgggctgatctttgcccctggtatgcattaatggactccactgaatcctgaaaaaaaaattaaacttccttcttacttgccagtctctagcttcattgttctctgttcacagggttcctgaaatgccaacccaatgcc

SEQ ID NO: 964 - DNA, 1517 bp, Homo sapiens
  Genbank Accession No. D17408
aggagggaagagtgtgcagacggaacttcagccgctgcctctgttctcagcgtcagtgccgccactgcccccgccagagcccaccggccagcatgtcctctgctcacttcaaccgaggccctgcctacgggctgtcagccgaggttaagaacaagctggcccagaagtatgaccaccagcgggagcaggagctgagagagtggatcgagggggtgacaggccgtcgcatcggcaacaacttcatggacggcctcaaagatggcatcattctttgcgaattcatcaataagctgcagccaggctccgtgaagaagatcaatgagtcaacccaaaattggcaccagctggagaacatcggcaacttcatcaaggccatcaccaagtatggggtgaagccccacgacatttttgaggccaacgacctgtttgagaacaccaaccatacacaggtgcagtccaccctcctggctttggccagcatggcgaagacgaaaggaaacaaggtgaacgtgggagtgaagtacgcagagaagcaggagcggaaattcgagccggggaagctaagagaagggcggaacatcattgggctgcagatgggcaccaacaagtttgccagccagcagggcatgacggcctatggcacccggcgccacctctacgaccccaagctgggcacagaccagcctctggaccaggcgaccatcagcctgcagatgggcaccaacaaaggagccagccaggctggcatgactgcgccagggaccaagcggcagatcttcgagccggggctgggcatggagcactgcgacacgctcaatgtcagcctgcagatgggcagcaacaagggcgcctcgcagcggggcatgacggtgtatgggctgccacgccaggtctacgaccccaagtactgtctgactcccgagtacccagagctgggtgagcccgcccacaaccaccacgcacacaactactacaattccgcctagggccacaaggccttccctgttttccccccaagggaggctgctgctgctcttggctggacccagccagggcccaagccgacccccctctccctgcatggcatcctccagcccctgtagaactcaacctctacagggttagagtttggagagagcagactggcggggggcccattggggggaaggggaccctccgctctgtagtgctacagggtccaacatagagccgggtgtccccaacagcgcccaaaggacgcactgagcaacgctattccagctgtccccccactccctcacaagtgggtacccccaggaccagaagctcccccagcaaagcccccagagcccaggctcggcctgcccccaccccattcccgcagtgggagcaaactgcatgcccagagacccagcggacacacgcggtttggtttgcagcgactggcatactatgtggatgtgacagtggcgtttgtaatgagagcactttcttttttttctatttcactggagcacaataaatggctgtaaaatctc

SEQ ID NO: 965 - DNA, 6754 bp, Homo sapiens
  Genbank Accession No. D31883
gagagaagcctgatatgtaacccaggcgggtgggagcctcagtctgtcgggctgaggtctggcatctacaaagcctcttggccgtgttctgaacttgaagcctggaggagttctctgctcagcacagccaaggaacagaattagaagaaaaggaaccctggcctgaggcaggtgacaaacattaccaccccagctgtgcacgatgcagcagatgcaaccagatgttcacagaaggagaggaaatgtatcttcaaggctccaccgtttggcatcccgactgtaagcaatctacgaagaccgaggaaaagctgcggcctaccaggacatcctcggaaagtatttattctaggccaggctccagtattcctggctcaccaggtcatactatctatgcaaaagtagacaatgagatcctggattacaaggatttagcagccattccgaaggtcaaggcaatttatgacattgaacgtccagatcttattacctatgagcctttctacacttcgggctatgatgacaaacaggagagacagagccttggagagtctccgaggactttgtctcctactccatcagcagaagggtaccaggatgttcgggatcggatgatccatcggtccacgagccagggctccatcaactcccctgtgtacagccgccacagctacactccaaccacgtcccgctctccccagcatttccacagacctggcaatgagccgtccagcggccggaactcccctctcccttaccggccagacagccgccctctaactccaacttacgctcaggcccctaaacatttccatgttccagatcaaggaatcaacatttaccgaaagccacccatctacaaacagcatgctgccttggcagcccagagcaagtcctcagaagatatcatcaagttttccaagttcccagcagcccaggcaccagaccccagcgagacaccagagattgagacggaccactggcctggtcccccctcatttgctgtcataggacctgacatgaaacgcagatctagtggcagagaggaagatgatgaggaacttctgagacgtcggcagcttcaagaagagcaattaatgaagcttaactcaggcctgggacagttgatcttgaaagaagagatggagaaagagagccgggaaaggtcatctctgttagccagtcgctacgattctcccatcaactcagcttcacatattccatcatctaaaactgcatctctccctggctatggaagaaatgggcttcaccggcctgtttctaccgacttcgctcagtataacagctatggggatgtcagcgggggagtgcgagattaccagacactcccagatggccacatgcctgcaatgagaatggaccgaggagtgtctatgcccaacatgttggaaccaaagatatttccatatgaaatgctcatggtgaccaacagagggcgaaacaaaatcctcagagaggtggacagaaccaggctggagcgccacttagcccctgaagtgtttcgggaaatctttggaatgtccatacaggagtttgacaggttacctctttggagacgcaacgacatgaagaaaaaagcaaaactcttctaagtcccactcgtgaatggcaattagagaaaggactgacagtggcggtgccccataggatgtcatattgaggcccaaacttgattggagaatttgcaaactaccgtcgctcagcaacaccaaaaagagaaagtctggttaaaacaccatgagtcaaatgtcgggccagccaacagtaacacttgccaagaagcatggcgtagaaatttctatgttccgaaacacagagtagtgtccacatgtgaccttttcacattaccttatgtatacaacaggagctgcgttgttttcttctttttcttttcctttatctgttgtccaacaacagtgctgactgtccggataagagctggcaagtgcccttaggatgccgcatgggaaaaatcggttatcataatttcaaagtataaatatatttattatgtagcgctgcggctaagaaggaagagtgaggggtctgtccatggggtggcagtgatttcacacccgcctttcttgaatggcttcgtgttactcagccgtgccctggcaggaatggaactccatcagggaacagggcagctctgtttgaatggggtgaaaaacagcaaaattaattcttagcaagctccttgttctctactgttcaccgggacctggctggcaaatgacttagctattagtatatttaaaaactgttcaaaagcaaaagagaaggaacaggaatgaaaggaaaccttcccttaactctttctgcttcccatagcaggtctggttcctgctccccgcctaggacaggagctgtctggagctccacctttgcaaagaaaggaaaaacacaaattgcccccagattggcccagtggcatgccattaggtgattttgcgtaggggccatatcattcatggccaaaaaaaaccaaaaagcaaaaaacaaaaacaagtcccatgtcctactgactctagttcttccagtcgttatcctctgctgtctctctggcatcctatgaatcagatcaagcccatgctgttgttggtttttaaggtttctttcaataataggctaaggaaagacatgtttttctcttttaaatctctgcaactccaaagtagactccttcgaacgtatttaatttggccttttcagctttcttcttgcccagctctgtcgaattcatgggtgtgtgtgcacatgttggtttcactcacccagagtaattttgtgagcatgcatgtgctttttaatttctgcttgaatgtttgtcctgctgtgttgcagcttctaaagacattgtcaccgagtgtgtgtgactcaaagatcaagagtgaggctaaactgcgaccccaacatcacttccttcatggaaaggtgttggcgctgatgtagctcatggaaggatcagactgggaaccacagaggaaggatgaggtgggatgtggaggtcagagcatctcacgagagtccctcaggctctgcaacactagattcgaatatgagcctagggtttccccaacacgtgcgtgcatatgaaaccacatcatgattcccgacgtgagttagatgagggagagtttgtgtaactccacacccaggagggtaagccactttattatcatgctttggggctgtgcttaagaatttaagctctgttttaaagccgaagaagaaaacatttgaatttaccttcatatgccactaagaacaaaagctctgaagttcttcctgctggcaccaaatattaggattacaagctgtctctctgacaccagtggtaaaaaagcaagtagaatagtttctgagtctgtgttgcagcctctgacacgtggctcactgctgtcatttggggggtggaatgaacagtcactgttctatagcatcctcctgtgctcttacctaaggaatctaaattgtcctagccttccattgctatgcactgaatgaggactactctcgtgtgtgtgtgtgtgtgtgtgtgtgtgtgtgtgtgtgtgtgtgtgtgttggatctactaacatgtttagcaaatggctctgacagggtggccatgagcagatgagaccagctcttgcttggttggaagccacactgcagtttgcagtttagcctttggtgtctcagtggcctcttgcttattccatgctttttctatcccatcctctctctgtgccctcctgcaatggcagccttggcacaatgcctgggtgtcctcatccttgctttactctggaaagtgtggggatggagaggatggtgcatttccagtgcttccttacctgtcaataacaatggtggccacctgggtcccagcacttggctggtggagagatttttttcattatggagctaataaagggtccctacgttttacattgattaatgaattatcacccagacatgtgcagatgaaatgtcaatataagaaaaatcaaggtatttgggaaacatgggcataatcaggtagttttgctaaaattcctcttccttggtctacataaagaagacatgggtctgtcatagaatggggacattagactgaaaactgggacaacccccttccttattttatagagactaggagttaaggggcctgcctaagattgcagtgataaagaactgaaccctaaatcagctcccactaatgaaaccctgctttccttgtatcttttaaactcagttctgcatccaacttgagaagaaaaaaagcttctttccatatcaagtaccatatgagttcatttaaactgcaccttgcagaaatgcattgccagaaagcaccagtagcctcctatctgcaagcagagtagtgctctgctctggggaggggtcattggaaaccataatgcagagtgggccccctactccatttcccagcaaaaggctccagctggagggatgggttgtggggcaacctggttcctgctaactgccagattgaatgtgtgggctagaatgcctgcgcatttagttaaactgggctcagcatgcttgtcctcaaaatgtccatcctggtcacagcacacaagatggctattggtctgcttttaccctaccctgtactatacatgaaaattccagttattaacacactcaaactggtggagcttgttcaccctaggaaggggattgtatatatggcaggcttccctggtgccgatgtaaagggctacatttgggaacatttgacttccttgggactcttaagtgcatactgatggcatgaagtaaaaggggcctcaatgatgataggaaaatcagttcttttaaaatttcttcaagaaaatccaggctatcacatagtctttctgtgtgacttattaggagataggaagagcattgggaaacttgcacagctagctatgcatctacattttggtttggggttagttatgaaatgttcttaatatgacgtgttcaataacttcacataaacttcctgttctccaaaacctcaaagagatagagttaatgagttgttgtttttttttaaatgggggtagttttctatctgtcatgggctctagcatctactccgctacccaattctgtcatctccaagctgagtttcctcttctgaggcagaggctggagcagttctttttcagttctcatcctctccatcccaatccagtatatcaatcaactctaactcggagacgtctagctggcaatgtttctaaaactttcactggatttctttagacattgaagcaaacatttttttctaagaattgcttctcagatgatgatatcaaatgtatatgcttttgcaagtttgaaaagttcaaattaaccacttttgactaggtaagtctttctaaaaaccatttaaagctaactgggtcttagcatcctcctgtgtatggaagagacaggtgaccgctccaggttgggtgctcacagaacccttttcctgactctcatggaagatggtggaaggaaaatagactgtctcatcaaccctcctgtgtcctctgaagcaatctcagtttttattaaccacctcttctgtgtttctggtagctatttaacctgtatttaatctgtacttcctatgccagcctcaattttatttgatttttaaaattattctcttctaaccaatgaagtgtttgtcagtatgccccaaagcttgctcttttgtgctcccttttgaataactttctatccagaaaaagagattatttgggacttgagatttgcagtgataccaacttatagcaatgatgtactttaagggaactacccaactatgttgtgatagaagaaagagaaaccttcactttggcattttttttaatcactgtttatttttctgtttgcggcccaggaagcagtgggaggtggtggcagatatgctttgcatatggattgttatgtttttatttgggcaagtttaatcatggaaaactcaaaaagaaggggggaaatggtcagtttaagccaaaagaaactttctaaacaatgtataggtacacagcaaaattaaacaaatccaacaatttctgaagcttagtgtaattgagtggtggttgttattcaataaaattattcccaaaagtgtttctcctaagagtgcagttcccatgagtcacttcctgaacccattgaccaaaggtggacagagacaatcctgtagaccttgacattcagaaagatgtgagctgcttactgatcatatatgcatacgtttctttacagcagaggaaaccattgtccacaaaactgatgttcttttggggttttatgtacagacttgtccaatcatgtgtgtggttcctgcgagttgctgatgactccgcattgaagctctctgagttctttgattttaagttgggtttatggaattttttcaaatgttggaaggcgtgtggttcttcctgccctccctccccttttggaaatatgaaagcaaatgtttagaagaattccttttgaaaagctgtgtcgtgttccctgtgaaactgagcaggtgtgtgttggcgcgctaagtgccacatgcttgtgtgtagaggaggaggtggccctgccggctccgcgctgctgtgcctgtgatccctacctgctccccgctcctgttgccagcagcactcactgcactcctttgtcatatactctgcatcactgtcatactcacaacttcgtgaataaagttgtgtgctttattcgt

SEQ ID NO: 966 - DNA, 4517 bp, Homo sapiens
  Genbank Accession No. D45371
ctgattccataccagaggggctcaggatgctgttgctgggagctgttctactgctattagctctgcccgggcatgaccaggaaaccacgactcaagggcccggagtcctgcttcccctgcccaagggggcctgcacaggttggatggcgggcatcccagggcatccgggccataatggggccccaggccgtgatggcagagatggcacccctggtgagaagggtgagaaaggagatccaggtcttattggtcctaagggagacatcggtgaaaccggagtacccggggctgaaggtccccgaggctttccgggaatccaaggcaggaaaggagaacctggagaaggtgcctatgtataccgctcagcattcagtgtgggattggagacttacgttactatccccaacatgcccattcgctttaccaagatcttctacaatcagcaaaaccactatgatggctccactggtaaattccactgcaacattcctgggctgtactactttgcctaccacatcacagtctatatgaaggatgtgaaggtcagcctcttcaagaaggacaaggctatgctcttcacctatgatcagtaccaggaaaataatgtggaccaggcctccggctctgtgctcctgcatctggaggtgggcgaccaagtctggctccaggtgtatggggaaggagagcgtaatggactctatgctgataatgacaatgactccaccttcacaggctttcttctctaccatgacaccaactgatcaccactaactcagagcctcctccaggccaaacagccccaaagtcaattaaaggctttcagtacggttaggaagttgattattatttagttggaggcctttagatattattcattcatttactcattcatttattcattcattcatcaagtaactttaaaaaaatcatatgctatgttcccagtcctggggagcttcacaaacatgaccagataactgactagaaagaagtagttgacagtgctattttgtgcccactgtctctcctgatgctcatatcaatcctataaggcacagggaacaagcattctcctgtttttacagattgtatcctgaggctgagagagttaagtgaatgtctaaggtcacacagtattaagtgacagtgctagaaatcaaacccagagctgtggactttgttcactagactgtgcccttttatagaggtacatgttctctttggagtgttggtaggtgtctgtttcccacctcacctgagagccattgaatttgccttcctcatgaattaaaacctcccccaagcagagcttcctcagagaaagtggttctatgatgaagtcctgtcttggaaggactactactcaatggcccctgcactactctacttcctcttacctatgtcccttctcatgcctttccctccaacggggaaagccaactccatctctaagtgctgaactcatccctgttcctcaaggccacctggccaggagcttctctgatgtgatatccacttttttttttttttgagatggagtctcactctgtcacccaggctggagtacagtgacacgacctcggctcactgcagcctccttctcctgggtccaagcaattattgtgcctcagcctcccgagtagctgagacttcaggtgcattccaccacacatggctaatttttgtatttttagtagaaatggggtttcgtcatgttggccaggctggtctcgaactcctggcctaggtgatccacccgcctcgacctcccaaagtgctgggattacaggcatgagccaccatgcccagtcgatatctcactttttattttgccatggatgagagtcctgggtgtgaggaacacctcccaccaggctagaggcaactgcccaggaaggactgtgcttccgtcacctctaaatcccttgcagatccttgataaatgcctcatgaagaccaatctcttgaatcccatatctacccagaattaactccattccagtctctgcatgtaatcagttttatccacagaaacattttcattttaggaaatccctggtttaagtatcaatccttgttcagctggacaatatgaatcttttccactgaagttagggatgactgtgattttcagaacacgtccagaatttttcatcaagaaggtagcttgagcctgaaatgcaaaacccatggaggaattctgaagccattgtctccttgagtaccaacagggtcagggaagactgggcctcctgaatttattattgttctttaagaattacaggttgaggtagttgatggtggtaaacattctctcaggagacaataactccagtgatgtttttcaaagattttagcaaaaacagagtaaatagcattctctatcaatatataaatttaaaaaactatctttttgcttacagttttaaattctgaacaatttctcttatatgtgtattgctaatcattaaggtattattttttccacatataaagctttgtctttttgttgttgttgttgtttttaagatggagtttccctctgttgccaggctagagtgcagtggcatgatctcggcttactgcaacctttgcctcccaggtttaagcgattcttctgcctcagcctcccgagtagctgggaccacaggtgcctaccaccatgccaggctaatttttgtatttttagtaaagacagggtttcaccatattggccaggctggtctcgaactcctgaccttgtgatctgcccgcctccattgtgttgttatttgtgagaaagatagatatgaggtttagagagggatgaagaggtgagagtaagccttgtgttagtcagaactctgtgttgtgaatgtcattcacaacagaaaacccaaaatattatgcaaactactgtaagcaagaaaaataaaggaaaaatggaaacatttattcctttgcataatagaaattaccagagttgttctgtctttagataaggtttgaaccaaagctcaaaacaatcaagacccttttctgtatgtccttctgttctgccttccgcagtgtaggctttaccctcaggtgctacacagtatagttctagggtttccctcccgatatcaaaaagactgtggcctgcccagctctcgtatccccaagccacaccatctggctaaatggacatcatgttttctggtgatgcccaaagaggagagaggaagctctctttcccagatgccccagcaagtgtaaccttgcatctcattgctctggctgagttgtgtgcctgtttctgaccaatcactgagtcaggaggatgaaatattcatattgacttaattgcagcttaagttaggggtatgtagaggtattttccctaaagcaaaattgggacactgttatcagaaataggagagtggatgatagatgcaaaataatacctgtccacaacaaactcttaatgctgtgtttgagctttcatgagtttcccagagagacatagctggaaaattcctattgattttctctaaaatttcaacaagtagctaaagtctggctatgctcacagtctcacatctggtgggggtgggctccttacagaacacgctttcacagttaccctaaactctctggggcagggttattcctttgtggaaccagaggcacagagacagtcaactgaggcccaacagaggcctgagagaaactgaggtcaagatttcaggattaatggtcctgtgatgctttgaagtacaattgtggatttgtccaattctctttagttctgtcagcttttgcttcatatattttagcgctctattattagatatatacatgtttagtattatgtcttattggtgcatttactctcttatcattatgtaatgtccttctttatctgtgataattttctgtgttctgaagtctactttgtctaaaaataacatacgcactcaacttccttttctttcttccttcctttctttcttccttcctttctttctctctctctctttccttccttccttcctccttttctctctctctctctctctctctcttttcttgacagactctcgttctgtggccctggctggagttcagtggtgtgatcttggctcactgctacctctaccatgagcaattctcctgcctcagcctcccaagtagctggaactacaggctcatgccactgcgcccagctaatttttgtatttttcgtagagacggggtttcaccacattcgtcaggttggtttcaaactcctgactttgtgatccacccgcctcggcctcccaaagtgctgggattacaggcatgagccatcacacctggtcaactttcttttgattagtgtttttgtggtatatctttttccatcatgttactttaaatatatctatattattgtatttaaaatgtgtttcttacagactgcatgtagttgggtataatttttatccagtctaaaaatatctgtcttttaattggtgtttagacaatttatatttaataaaatggtggaatttaaa

SEQ ID NO: 967 - DNA, 515 bp, Homo sapiens
  Genbank Accession No. D55884
  misc_feature (1)..(515): n = a or c or g or t
cttcactccattaacacaagcagtgttttatttaataatcatcaatgaaataaatgtgcctgaaattgattttaaaaattacagtattagatcataaagtaaaaaccagcagtacatttttagtcacactgaaaatgaaggacttaattttccccacaagtttcagtgtttttagtaattaattctatgcattttatacaaatagaaatatatatatatnnnnnnnnnnnngtntaanaaggagtagcctaagattaatttaaaagattatttacagatgacacatttatggggtcactatttaagtaaatttgctgccctccacagccttctaattttatttatatgttccagcagattattaggatctgcttacttcttaggaaagaatcaatgctggcaacacattgtttcagaaacaccaagtgcaaaggattgattgtatcacaacaggtacaaaactgacagagttttctttttgtttagggccatgtttactaccctgaaatggtgta

SEQ ID NO: 968 - DNA, 553 bp, Homo sapiens
  Genbank Accession No. D55886
aatccttagggcccatgcccaaatctttccattgcttctcaggttagaatgaccttcacctccaacatgagcttggaggtgatgaggcagtggctctgtgccagctgccacaatgtgactttgatgtccacctgtaccacctctcactgggctctagcaccaccctcccctccccgcacaccaactgaacacagctctgagaagcaaagtgtgtggacccaaaactgccaagcctgagtctgtcccgtgcttctgctgctccatcctttgagttctgcattgccatcctgacgtcggccacaggaggcctgctttcttccagctgttgttctcaagttccctgcccctccacatcgcccgccagtggtgttgggttttcgttctgcttccaacctgagtaaagtgtgtgtgctgagttcatcccatgttctcccatggtcatggcttcccggcccatggggacccctctcccatcccagcagtgactggtgacagtgtgcaggtgcagtgctagctcttcgttccctctaaagggtgtgcactctttttattc

SEQ ID NO: 969 - DNA, 341 bp, Homo sapiens
  Genbank Accession No. D60584
acatttggmaaatatacttyattcaataatataaacmatgtagatatatyycmytatttaataatcatttthagtbtattgcacagatgcacatgtcaataattagtgtttttcagatgggatgatatacattctgcttttatttttatctctttggtaacaattattgacagaacaatgaaacaaagataaattgttttacagttgtaatacccttgtatggtaattctcagcctctttyatcttatattctactagcacttacatctaataggtctcaataaagtagaaatgtaaaastatgtatyyccagaaaaggtcatatttcataaagattctgt

SEQ ID NO: 970 - DNA, 441 bp, Homo sapiens
  Genbank Accession No. D63177
  misc_feature (1)..(441): n = a or c or g or t
gtaaaagccagccagtgttttcaatatagacttccangtttgaccatctgaaaatgaaaaacactaaaaacatcacatgctgtttaggagctggaaattttaatatttgacttcaagtagatggtttttaactcctgaaatcgaactacgtttaagtttgtatgtttattacctgtttgagcacttaggtgcaattgtgggagcggggatgtcaagttcatttatgtgactctttggctcaacttacataatctttgttttgatatcacagttgtctaattattttactttgtagcttaaggcaggctgaattgttgataaaatggaaaagtagtatattgttatataagcttctgaggtgtgttttgttgtataagccctgggggttaaaagtcatccttatgtatagtagttaarggcataaacctgtgacttttagat

SEQ ID NO: 971 - DNA, 456 bp, Homo sapiens
  Genbank Accession No. D79487
ccgtcttgtaagatgagttaggctgccccttggaccagccacaaaatggaatatcaaggcttatgtacatacgtgaagagttaccaccagtcctgccacctttggacagctctaacaccatccccagcatccagtcagacctagtaaagaaaaccttggattcttaacccaagataggctgtaaatcactagctttttttcctcatgaaaaaaaatagagttaaaaaatatttcctctcttttccatattccagctgaactccgtttccaaaggcacaaagaagagtgtgcttattcagattttgaatctttttggtaccttttgggtaatgmcatagcctcctgaattctggatgtcttcaaagtcagttttgcttctttatcctgaaaatcagatttacaatgctgaggcatttcttgggcccagtgtagctcacggaatctcttgtacccata

SEQ ID NO: 972 - DNA, 3248 bp, Homo sapiens
  Genbank Accession No. D80008
ctagaacgaaaggagtgaggcgccgagagcccagataccattttggcgtgagagctggtggttggcaaggccgcgggagtgggaagcgtccgccatgttctgcgaaaaagccatggaactgatccgcgagctgcatcgcgcgcccgaagggcaactgcctgccttcaacgaggatggactcagacaagttctggaggagatgaaagctttgtatgaacaaaaccagtctgatgtgaatgaagcaaagtcaggtggacgaagtgatttgataccaactatcaaatttcgacactgttctctgttaagaaatcgacgctgcactgtagcatacctgtatgaccgcttgcttcggatcagagcactcagatgggaatatggtagcgtcttgccaaatgcattacgatttcacatggctgctgaagaaatggagtggtttaataattataaaagatctcttgctacttatatgaggtcactgggaggagatgaaggtttggacattacacaggatatgaaaccaccaaaaagcctatatattgaagtccggtgtctaaaagactatggagaatttgaagttgatgatggcacttcagtcctattaaaaaaaaatagccagcactttttacctcgatggaaatgtgagcagctgatcagacaaggagtcctggagcacatcctgtcatgaccatgcgccgaggcacttccaggcttcactcaactcatggactcctctgtactcactctctccaccctcccttcacctccctctttgattttagaagctatagacattgtttaagataactaagaatacttggctaagaagtataatttgctaactattaaggactttctttttttaatgttgtacactattcttcctactcttttttggttttggttttgttttgtagagactgtctcactatgttgcccaagctggtctcaaactcctggcctcaagcagtcctcccaccttagcttctcaaagtgttgagatcacaggcgtgagccactgcacccgacccctactcctttttctaataagctgtatctgtaatcacagcattcctacagttgttacagtgtgttttttaaatgaaagtaaacatggttacatttgaatctcttaaataatcagtcacttggctggacaggaagaaggtagatcctgtgtgtcttgttttctggtcatgtgtattgtacaagctagagagctgaatttctgagatacacattttcaaatcacatgcaagtgaagatgatggtctgtagaaattttcagtatatataatgtttaatgacatactaatttatcatctggctatttgggaaggaaggacacacatggattttgcacatttccaccatggtggctggtgtggcttgtggctatggggtgatcaccagtatcaccactttggaaggggacagtgaaattggggctagagaaggaactttgtacagttttccctgagattcagattgactgaaaagtcacatgaagagttgattgtcttttaatggtatgttttaaacagctgacattttaaattttgatgaaatccagtttattcgtttgttcttttatgctttgggtgttgcatccgagaaatcttttcccatcccaagatcacaattttttttcctttttacttctagaagtgttataattttaagctttatactttggtctatgacccgtttttttttttgttttgttttgttttttcgtttgtttctttgttttgagatggagtcttgttctgtcacccaggctggggtgcagtggcgtgatcttggctcactgcaatctctatcccctgggttcaagtgattctcttgtctcagcctcccaagtagctgggattacaggcacaggccgccacgcccggctaatttttgtatttttagtagagacagagttttaccatgttggccaggctggtttcaaactcctgacctcaagtgacccaccttggcctcccaaagttttgggattacaagtgtgggccaccgcggccagcctatgatccattttgaatgaattttttatatggtgcaaggtgtcaatccaccttcactttttcttgggaatatagatatccagctgtttcactaccattttttgaaaggactgccctttgctctatcacctttgcatttttgttaaaaagtagttgtcaatgtatatgtgggtttatttcaggactctgttttgttccattgacctgtttttctctcctgaatgccaataccatatttgtatgtagtgtatgtaattttctaataattcttgaaacagatagtattaatgcgtcatatttttgctgttgtttgtattttttgtggagatggggtttcaccatgttggccaggctgtgttgaactcctgagctaaagcaatacacttgcctcgtcctccccatgtgctgggattacaggcgtgagccttggtgctggcccagtgtaccacatttctttttgagatttgttttggctatgttaagtcctttgcttttgatgtgaaatttgggaacaggcagggtgtggtggcttatgcctgtaatcctagaactttgggaggcctagatgggtggatcacttgagctcaggagttccagaccagcccgggcctatggcgaaactccgtctctacaaaaaatagaaaaaattagccaggtgtggtggtgcatgcctgtagtcacagttacacggcaggctgaggtgggaggatcacttgaaccccagaggtcaagactgcagtgagctgagatcacaccactgtactccagcctgggtgacaaagtgagactctatctcaaaaagaaattaggatcaacttgtcaatttctacaacaacaacaacaaaaacccctgttgggcaccttgattgagattgcattgaatttatataaaactgttgggagaattgacatcttaataatattgagtcttctggcctataaacaaggtctgtcttcctaggtattaatgttttgtcttctatttctcttaataatcttttgtagttttcagtgtacaggtctaccatgtcagcatttcatagttttgatgctaaatggtattttaaaatttcaaattctaaccacttgttgctagtaaatagaaatacaattgatgttgaacttgtatccttcagccttgctaaactgtgagttctcatggtgtttttgtaaattacatcaacagtcatgtgttctatgaataaagagttttactccttc

SEQ ID NO: 973 - DNA, 1594 bp, Homo sapiens
  Genbank Accession No. D84110
atcccggacttcccagagcctgcctggagcgcgtactcagcggctctcgggtcccagcgtcccagccgcggcccgcgctcctccgccccgctcctcctcctcctcttcctcctcctcctcctctctaggcacccccgtcccctccttccagcggctgcagcccccagccccaactctccgcgcttactcctgggacgcgcgtcctcgccccatcctttgcttccttccttccttccttcttccttcctcccctggctcccgccctccctctccaggtcgccctcccggggcccgattgtctcggttccccgctgccggcccgcgccctgccccgtctctcccttgcacttcctgagtcgcccgccgccgccgtcgcagactcgccgcgggagccccagcccaacccgagcccgacagccactgccccggctccagctccagccccacagcccgcggcgcccgcccgagggagccccggcgcccggggaaggctccagtgggctagcgcgccctcgcccagccccgcgccccagccctgcccggcccggcgaggaaggaccgggaagatgaacaacggcggcaaagccgagaaggagaacaccccgagcgaggccaaccttcaggaggaggaggtccggaccctatttgtcagtggccttcctctggatatcaaacctcgggagctctatctgcttttcagaccatttaagggctatgagggttctcttataaagctcacatctaaacagcctgtaggttttgtcagttttgacagtcgctcagaagcagaggctgcaaagaatgctttgaatggcatccgcttcgatcctgaaattccgcaaacactacgactagagtttgctaaggcaaacacgaagatggccaagaacaaactcgtagggactccaaaccccagtactcctctgcccaacactgtacctcagttcattgccagagagccatatgagctcacagtgcctgcactttaccccagtagccctgaagtgtgggccccgtaccctctgtacccagcggagttagcgcctgctctacctcctcctgctttcacctatcccgcttcactgcatgcccagatgcgctggctccctccctccgaggctacttctcagggctggaagtcccgtcagttctgctgaatactatacccttcagcaatggctactagaaggacgaacaattgccctcctttggaagtacggctaatagaagccctagatccgaataagatccgaataagaatatgtaatggaccaggcgcagtgcctcacgcctgtcatcccagcactttgggaggctgaggcaggcggatcacttgatgacagaagtgtgagaccagcccagccaacatggtcccaggtgtgtgatggcggctgcaatctgtcttgtgggtattaatgcaatcttcagtggtggctactgttctctagctgttctacaaaactggagcatgctggcttgaaaaacccttgcccagtttggatcccttcaagactttgtcacagcctctatcacacatctgtttttctcgaagaaaaaaatataattaataaaaatgttttactcttttacactg

SEQ ID NO: 974 - DNA, 778 bp, Homo sapiens
  Genbank Accession No. D84111
accatttaagggctatgagggttctcttataaagctcacatctaaacagcctgtaggttttgtcagttttgacagtcgctcagaagcagaggctgcaaagaatgctttgaatggcatccgcttcgatcctgaaattccgcaaacactacgactagagtttgctaaggcaaacacgaagatggccaagaacaaactcgtagggactccaaaccccagtactcctctgcccaacactgtacctcagttcattgccagagagccattaggaggagctaatgaacatggagagaggcagtgaagtgcagaactgcagggtctggactcatgatcttgattgattcacatcctggctctgtgagagtcgttgggctggatatttaacctcgctgtgtctcagctttctcataagatgagctcacagtgcctgcactttaccccagtagccctgaagtgtgggccccgtaccctctgtacccagcggagttagcgcctgctctacctcctcctgctttcacctatcccgcttcactgcatgcccagatgcgctggctccctccctccgaggctacttctcagggctggaagtcccgtcagttctgctgaatactatgtcccaggtgtgtgatggcggctgcaatctgtcttgtgggtattaatgcaatcttcagtggtggctactgttctctagctgttctacaaaactggagcatgctggcttgaaaaacccttgcccagtttggatcccttcaagactttgtcacagcctctatcacacatc

SEQ ID NO: 975 - DNA, 441 bp, Homo sapiens
  Genbank Accession No. F22640
  misc_feature (1)..(441): n = a or c or g or t
aggaaaaggaaggagccccaggtgtcagggcagtaggctgggagtcagtgtggcaaagcgggggcaggacacagatacanngggcaggggcccagggctgggacatgagagaaggcagcgaggcggcagagggagaagagaggactcaggtggaggtggggtgggtcagctgtcagcatccctcagaggagaaatgtggagagctggaggccagcagtcactcacactcgctctgtcctcctgtccagtggatacagccctgggcgctctgctggcccaaggatgtccccactgcccctccatggcctctggccttcttcccattcatatttatttatttattgacttttatgaagtttccccttccatccgatccctactgcccatgttgtcctgaccatccctcccagccatccagctgtctgtctgtctgccacaagg

SEQ ID NO: 976 - DNA, 408 bp, Homo sapiens
  Genbank Accession No. F36908
  misc_feature (1)..(408): n = a or c or g or t
ttgccttanaagggagagggaaggagggaggcaggcatagcatctgaacccagtgtgggggcattcactagaatcttcaatcaacctgggctctccccaccccaccccagataacctcctcagttccctagggtctcttcttgcttgactcaatctacccagagatgccccttagcacacctagagggcagggaccataggacccaggttccaaccccattgtcagcaccccagccatgcggccaccccttagcacacctgctcgtcccatttagcttaccctcccagttggccagaatctgaggggagagcccccagagagcccccttccccatcagaagactgttgactgctttgcattttgggctcttctatatattttgtaaagtaagaaatataccagatcta

SEQ ID NO: 977 - DNA, 337 bp, Homo sapiens
  Genbank Accession No. F37133
tgcattttcacacgcatctcacactcctctgcactctcaacttggagagctccaaacagggaaaccccaagccttgctggcttctgccaaccccctgagcagaagcatgggtccccctgaccaccacctcaccaccctcatcctgatctcactgtacactccctttcctggtctgctaagtagcgggtgtttttccttgacactaacgctacagctagaccacggtgggcttggcaacaggtgtcttcccagatgctggcgttaccgctagaccaaggagccctctggtggccctgtccgggcataacagaaagctcgcactcttgtcttctgggca

SEQ ID NO: 978 - DNA, 408 bp, Homo sapiens
  Genbank Accession No. F37480
gaactccgaggcataaatgtagttgtctcctactctgcttctcttactatactcatacatttttaatatggtttatcaatgattcatgtttccctcaaatagtgatggtttacacctgtcatggaaacaatcctagagagctcagagcaattaaaccactattccatgcttttaagtagttttctccacctttttcttatgagtctcactagattgactgaggaatgtatgtctaaattcctggagaagatgatatggattggaaactgaaattcagagaaatggagtgttcaatagataccacgaattgtgaacaaagggaaaattctatacaactcaatctaagtcagtccactttgacttcgtactgtctttcacctttccattgttgcatcttgaattttttaa

SEQ ID NO: 979 - DNA, 551 bp, Homo sapiens
  Genbank Accession No. H06350
  misc_feature (1)..(551): n = a or c or g or t
tccacatagcatggattctggagatgggtggctaatggtattggttcaacaactccacgaaggtaggggtcacgtcttggatccttttgccttaatctcagtgctcgttacttcatggtcccaagatggctgctgtatccccaagaatcatgtctgcgttcaaggaaggaggggtggaggaagaggaagggccaaactagctggacctgtcaccttctatcagaaagtaaaacctcgtcagaagtctgtttcctgctctctccctctgcatatcttcacttagatgcccttggcccgagccagctaccattgcacctctagctgcaaacaaagctaagacagcagggaacagaattgttcatggctgaatagaccaatcgtgttccatctactgaggactnggcacactgcctcctgcaataaaactggggatcccttaccaagngaggaatggcagaattgtgtaccagttaggntttgctgtgtaacaaacccttcccaaacntgggcaggtaggaacaaaccctgtattttnccacaatnctatgggg

SEQ ID NO: 980 - DNA, 660 bp, Homo sapiens
  Genbank Accession No. H10816
  misc_feature (1)..(660): n = a or c or g or t
agnctgggaaaccattcagggnaacatgnagtgaattttggncacaaactgggnctgnctgntgtggntagagaaaccccagnccgaagnaagnaagagaagnacggattgaaccggaaccatgattggggaaccaatgaattttgttcacctgaactcacattggctcaggggagatgggggccgagatgcacttgccatgacaggtgcagttcaggagcagatgagatccaagggaaaccgagataggccatggagcaattctaggggcttatagctccaataatggaatggttctgccatcttgaaacccccattctgtttccagcccagaagaaatgctgcccctaccagatccctccttgaaccagtgatctaaggacccctcttttccctatctgcctaacagtgcctcacaaggcttnggggctngacttcctctacttcctctngccatagcccctnctggagatngggtcaaggcagcaggacttatcaagtgactacttgttagccagaggagcttagctgaagnccttggaaacccttaggtntagatggagtttttaggacctggaattagttctgtntcttaaatatggtttggtccacctgttttaactttaaccctggnctctaaattgggatggtggtaanttt

SEQ ID NO: 981 - DNA, 523 bp, Homo sapiens
  Genbank Accession No. H11724
  misc_feature (1)..(523): n = a or c or g or t
ttttttttttttgacaagactcagaaaccgttttattaaactggaacacaaaatgcgtgttataataatgtcaagcctttatcagaaatcagtacataagtgaggatacacagccaaaatgagccatcaacaaaagcagtataaattttaaataagtttcagatttctatactcaatatgctaaagaaaataaaaccgaaagagtagtttcantttcacaattcacagttgattggttttaatcccatgacacgtttgtcattctgcagccccagaacacagacttccaaaggcagtgactgggcactccgacccaacaggcatacacagntcttaaggcctctgtatggacatttaggggaaaattttaattaaacaaccctnttttacacacagtttggggctgacattttttaggctattatccntttttcaaaggtagnttccaggtggaattggcaaaggcggtttttaaaggttggcctggcctttncattaaggggttctaaggccccctngggtt

SEQ ID NO: 982 - DNA, 453 bp, Homo sapiens
  Genbank Accession No. H15814
  misc_feature (1)..(453): n = a or c or g or t
aaattcaacaattttattaaatataaattgtctaaacaccaattaaaagacagatatttttagactggataaaaattatacccaactacatgcagtctgtaagaaacacattttaaatacaataatatagatatatttaaagtaacatgatggaaaaagatataccacaaaaacactaatcaaaagaaagttgaccagggtgtgatggctcatgcctgtaatcccagcactttgggaggccgaggcgggtggatcacaaagtcaggagtttgaaaccaacctgacgantgtgggtgaaaccccgtctctacggaaaantacaaaanttaggctggggcgcagtgggcatgagcctgttaggttccagctacttggggagggctgagggcagggagaattgctcntgggtaggaggtaggcagttgagcccaaggttcacaccacttgaactcc

SEQ ID NO: 983 - DNA, 660 bp, Homo sapiens
  Genbank Accession No. H15868
  misc_feature (1)..(660): n = a or c or g or t
gatcttatgataaataataaactaattgtggncttgtaaatgcatttgtatgtgatcctgtgcgactaaaatcacttaacaattctacaataagcttctgcatcaaagncctgaccgcttgctctatgccggaataacaccaaatggaatctcctcatctcttgcttgttagncgatgtgtctgattcagggcatctgtctttttgttacttttttgtccgtgtcctctcatttgggttttgtaactgcaattttcaaaccaaagtttaaaatcaccttttcttcctgttttgctgtagtcactggtgttcctcacccaccagctgtaactcagtttgtgtgaggtacagccacagaagatgtcatgtactgtatattacctggtgatagttgcttttcaccccccgagttcagtttctaggagccaatgaaacttcccctcacctcctcatctttccaagttgttctttgaattgagggagtttgaaggcataaacagttacttgggggatttgcgaaaatctacttagttactgcgtttacaggtctttggcccagtcttgacccttcccaaggatttgtgcaatgattgtgttactgctggatttttaaggtttttttttaaggaagggccattcataattgatanaccaaattacc

SEQ ID NO: 984 - DNA, 588 bp, Homo sapiens
  Genbank Accession No. H16294
  misc_feature (1)..(588): n = a or c or g or t
ttgaagttactccggactnctgncagattatagtctggggcctcactacacatcacagaaggtgtctgacagcctgggacaacatcgaggcacctcacttccccctgcctgggcctgttctccacctggggatgccagcagttgcttcctgggagtccctcatgggcttctccgaggccagccgccgaagccctagatccctttattgacagccagtttnaggacactgtcccaggcatctctaatggagcctgtgccggtgtgaggaccagggatgtcttttcccagccccaagagacctgttgctgctttcttgtaattatggggctccccagagtctgcgtaacagtctcccactgggctggctcacccacaggtgccatgtgcacactcctggttttcaaacaattctctggatttatttatttgttttaacttttctgtgctnaagagaggactagggggagggggcttccctttcagcttcccggcccccacaaccacagttntttttatttcacaacgtagcctggagagngaaatttggtctttgagttggaaccanttttggcttngtaatgttctagc

SEQ ID NO: 985 - DNA, 461 bp, Homo sapiens
  Genbank Accession No. H16568
  misc_feature (1)..(461): n = a or c or g or t
tttttttttctattttaagtgcaaatatcataagggaagactgaacttcttttaggagtataggacaagcagcaaggaggtgggatggctggagtagagtgaggaagagcaatacagagataaagtaagaggaagaataagccgggtcacatagatctcacagcaaagttttaggttttcttttgagtaatatgaaaagccatcggagggttttgaagagaagagagagacatgatctgacctacattttcaaaagcttactctggctattgtgtggaagtagaagcaaaaagtccctatggtggttgttgcaaccatcctggggacagaacgtggtggnctttgaaggaaggcagtggtagtgatggtgctgatgacaaaagaagtccagatttcaggatgttccnagggagccttttntaaattgaaaggacanctgagggcttcccaagttaaccgag

SEQ ID NO: 986 - DNA, 488 bp, Homo sapiens
  Genbank Accession No. H19400
  misc_feature (1)..(488): n = a or c or g or t
cagtcagtggcctctgctggagacaaagcctgcccagctggtgaccagcaagtgtcaggctgacgcccaggcccagcagtggcagctgttgccacacacatgacggagggattttcttgaagggtcagctattgcactgtgctgggaggctggctgtggctcctgtttgtgaagagaactcccagttccttttcacagccgctgagaacacatccacacatctaccccacggccttgtcttggaactgctcctgctatccccacaccctgcttcctcaccccactggctcttgggcaaatgactgttggtaccagggaccctggggggtcttccctaacaaagcagaccagcctgggggcagatatnacctaccacaggagccccctgttttttcatagggccaagggntccacattacccttaggagtttcatgggnttttagaagggttttaggantttttttgnaaattttttccttaaaattat

SEQ ID NO: 987 - DNA, 596 bp, Homo sapiens
  Genbank Accession No. H27948
  misc_feature (1)..(596): n = a or c or g or t
aacnagatanngaannntctttaatatcttgtagccgtaagactgatacaactgaaaacataaccctaaatttgattctgcaggttgcgnttacaacacaagttgaagtcacagccttgccggaactcttatgtaaagtttagggcattggatctggaaggagtgggaccctgagaatcgtaaagggatatttgggtggacttgagcaaatccaagaaccctgaactgaggaagagcagtgtgagtacatggtcaggggctccatgaatattcctgcctgcaaccccagcttcacaggcaattcagccttctccacactggcccggcactggctagctgctcaccttatggctcgaggcaggaccccccgcagccttgcagctgctgggaagttgctggaagttgtatctgtttattgcttttaaggctgtcatgagcagactaagacctcatattcacacaagtttgatgccaccaagaggacgggagctnggttgggtnccgagncttttagccgtttngcttgggttttgaccccgattntgagcncagatcatnctcgtgccaatttttggcttcnggcaattnctattagt

SEQ ID NO: 988 - DNA, 553 bp, Homo sapiens
  Genbank Accession No. H30384
  misc_feature (1)..(553): n = a or c or g or t
ttttttttgangtgaaaattttaaaatncatatttattgcaccaattcacagnaaagtgtcataacgnaccaccaacatgaatcagtttgtagggcatttacaagccacagtctgaaaataaaaatctgtctgtgttgaataggtcatttaacaaattacttgaaaactgcaagnaatcataattattataaatttaaagtttgtgattcaaacatgggttaagatcacagtcatggggagaagcccaacagattcctgtgatgatccttattttcttcctatatctttatatacatagagactctcaggcgcccctcactctgtgtcagtctgaattggatatgacagctcagttaggcctgagagaggattctatgaaanggagtggggaggggaaaggacattttctctgaccctctgtgggctgggcaaccttgttgactgaggagacagtgcgctcttctgaaattngattcaattttctataaattcatacagtcttctnatgaggtctccaagtctgcattgttnacactatcncattgttntttt

SEQ ID NO: 989 - DNA, 502 bp, Homo sapiens
  Genbank Accession No. H41870
  misc_feature (1)..(502): n = a or c or g or t
gtcaaaataactgtacattgtagaaaaaagtttttgcacttttcccaggggnagctagcaatagttttaaaagcacaaagtgatgtaaaatattttgacttttataataatgcgaagtagttttatttgcattaatcaataatgttcaggatctttttgtagtaagtatattttaaatggtgtaatttgtgtgtttatgatatgtattcaattatttaagttaagtatcagtgtatttttaaaaagtgttcccaggtgaacaaaagtttgcttttcttcaccattctgtacaggacaagcattattcagttcacatagtcagctctcactacacttccaacagaacgggggcaagttcgtatttggaattcngttatatttatcccaaggggaaggccaaattaacccttttaattattgggttatcnttaatggggtatttaaaggatgttattggnccccaaanggcctnttttggnggtttattaaaggtgtatttggg

SEQ ID NO: 990 - DNA, 473 bp, Homo sapiens
  Genbank Accession No. H42085
  misc_feature (1)..(473): n = a or c or g or t
cccttgcttcatccagcacagctctcaggtgggcactgcagggacactggtgtcttccatgtagcgtcccagctttgggctcctgtaacagacctctttttggttatggatggctcacaaaatagggcccccaatgctattttttttttttaagtttgtttaattatttnttaagattgtctaaggccaaaggaattgcgaaatcaagtctntcaagtacaataacatttttnaaaganaatggttcccactgttcctctttgccacagagaaagcacccagacgccacaggctctgtcgcatttcanaacaaaccatgatgggantgggcggccagtccagcctttttaaagaacgtcaggtgggagcagcccgggtgaaaggccgggcggtggagggaaagtgaaacgcctgatttcaaaagcagtttttttattttgacttttaaattttttcatccgccggagacantt

SEQ ID NO: 991 - DNA, 574 bp, Homo sapiens
  Genbank Accession No. H43374
  misc_feature (1)..(574): n = a or c or g or t
gatcctgtaaataggggggggtcacaaaagtaatatattgtgttatggaagataattttgtactgtgctgtttcctaaatcataccaatatcctaaagtcatgcacttcccagatgatcgtgatcctccaaatgctttgtaagatggggcagggcgtggaaatatatatatatacacacacacacagagacacacacacacacaagtatagtatatattttcctaacctttcttctgggtccttcctcagatctttgagtcacgatagaaaaggagctcgagttctttgtgtaggaaagttaagcttcctgcctgcggtgttcttgcaattgccttagggaattcacaagctctagggagttctgaacggaaggcagacgagaggcactttatccagtcccagaaaggattntttaaccgtgttgantgaggaagtcatctaggaaaaacttatatttttaatgtaaaaacaatgggggcttaccagacctcacnggttttgggcgtctacagtgcttttatattttgtaactgtaangagtttcattgcacagngggcngttgggatctggtc

SEQ ID NO: 992 - DNA, 492 bp, Homo sapiens
  Genbank Accession No. H54254
  misc_feature (1)..(492): n = a or c or g or t
acattttctttccaaagttggttattaaccacagaattatagcaggtattcataacttaagtttgaaaatcaatagcgtctgcaaatggattaacagattagagaatcaacagcatcggaaaataggttaatgcatattgcttctaacaagtgcatgaagaaatagaagaagctatgtagctttcagttctgacagaaaagggtgaaggagggtatcatttcaaganaaaaaatagctatcacgcaatggttatctctgaaaatatttgtattaagatgtgtatacatggccaggcatggtggctcatgcctgtaaatcccagcactttgggaggcaggtggatcacgaggtcaggagatcaagaccatcctgggccaacatgggtggaaacctcatcttctacttaaaantacaaaattgagccggggtgtggtggnccctggctgttagtcccagctgctcgggngactgaatttctttgaggcccggtt

SEQ ID NO: 993 - DNA, 400 bp, Homo sapiens
  Genbank Accession No. H58608
  misc_feature (1)..(400): n = a or c or g or t
gatatnttggagatggggtctcattgtgntggccaggctggtcttgaactcctggcctcaagctagctacctgccttagtctcccaaaatgctggaattataggcatgagcaccaacaccttgctcagtatcctcatttcttttcctagatacactgtctccttcaatgacacatagggacccatttgcgaaaacgccatcaggaagttttggaagctaccaggttnaaagggagatgtggtagctattccatgcaattcgaggttctataaattaaaataatagtcactgtagtcttttgggggaaacaggcntaatctaattgaggactacatataaatgtattttaggcactcagccngaagaggggntgtaggggntaaagactggggatttccca

SEQ ID NO: 994 - DNA, 380 bp, Homo sapiens
  Genbank Accession No. H68822
  misc_feature (1)..(380): n = a or c or g or t
ttccaacaagcagtgtttctatggaaggatttagaataaaaatatgatgttaacgataactgatagttacaaaaaactctaagaggatgtctgttctacactctaagtaaataactgaggaaggagaaaagagaattttgcgacttagattttggattttaattttgcaggatgagctgtcaggagtcttaaaatgcggccccacaaggagtatacaggtcccnattatgttctcaaaaaccaaaatgtaaaatggctgcttaagtaactgacaatgcaaaacagtttcaaantaganaacattctatttttcaatatggntgattttcataacttaaaaaagtttacataaggcatatcttgaaatacacatattttta

SEQ ID NO: 995 - DNA, 422 bp, Homo sapiens
  Genbank Accession No. H71532
  misc_feature (1)..(422): n = a or c or g or t
angtgaatggttaaatgtccaaaattctctaaataatctccaagataaattgaatccttactatatgccagacacagaactactctattaggtactttgctaagtaccttggataacattacttaatttttacaacagcccctatgagatagatattactactgccatcttatgatgagaaaactgaggtccagagtgggttaagttctcataacttgtctttgaaggctaaaagagggcaggatacaaaggccgggctctcccanctccagagggctgtggggttgcccaggcatactctactgcctccattggcacnggtatttaggggtgcttttatataggggggcaaaccagggggctattcggggcnggggggggagggccgggattanttctgggttagggccaaccgggggnag

SEQ ID NO: 996 - DNA, 650 bp, Homo sapiens
  Genbank Accession No. H92987
  misc_feature (1)..(650): n = a or c or g or t
gtgagggaaaaaaactcatatttcaatgattcccaagatcgttaagatataactacaatttactaatgcccaactgctcacagttttctaaacaactacaaaataaataaattgtagcaggtattttatgagaactgatacccatcaaaattgtgtatggagtccatgatggcctatcctccccagaagtcagagctcacagtgcccaacaccctcattatccagaggagaatctgaggacccatcatgccagtggagaaggctggagccagcactggcgccactttcctgagatgcccacactgattcttgtcccttctccctctctgaactctacttccagccagtttgggtcataacacaaaacatttaattgtattctctacatgaaaactttagttcaggaaaataaacatattaagaggttatttccctcaaatnactgagacantaaacttcacaacaggataggaanaaaatgnccaaggacactctcttgtagtctagggaaaatgcnagaacagtgcttttaaaatgattctaatgagactacagcataaaagtttttccaattagtttcagatttctccaactggcctactgggattaaacttttaataattcnctaacntattcnatttctgcatccg

SEQ ID NO: 997 - DNA, 631 bp, Homo sapiens
  Genbank Accession No. H92988
  misc_feature (1)..(631): n = a or c or g or t
acacaaagaaaaagattttattgtcttcttagtcaatatccctggtgaaattagaggcatagcttgagactggtgacagtgcaacacagaccttcaggagctgctttgaggactggcctgcccagatgcctgctgttaancagcagccccctcactccggcccctgccatcttgacagatggagctgccatggtttcagggacactcagcagggcatctgggttggtccctcccacatggaccttgtaaagttgctattcaggggaacctggtatcgtttcaggcaaaacacagaaccatattagcacttctaagccccctgccccggncgcctccccggaacatttgggcttgtcgcacattccaggagggagcaggagcacagctgcagccacagtnccaggaacaggcctgggctcccgcctgtgtggggggagggcagaggctgagggcttcctctgggggccctgagtaagctcaccctcancccacctctctgacttcatccatccaaggccgcttgcaagagcccaggcaaggtgaaggggctgtntccagacaagcctgggttgcctagcaaangtggggaaggggaacttcaggctagccaaatctccagaacnagggttag

SEQ ID NO: 998 - DNA, 5339 bp, Homo sapiens
  Genbank Accession No. J00124
cccagggtccgatgggaaagtgtagcctgcaggcccacacctccccctgtgaatcacgcctggcgggacaagaaagcccaaaacactccaaacaatgagtttccagtaaaatatgacagacatgatgaggcggatgagaggagggacctgcctgggagttggcgctagcctgtgggtgatgaaagccaaggggaatggaaagtgccagacccgccccctacccatgagtataaagcactcgcatccctttgcaatttacccgagcaccttctcttcactcagccttctgctcgctcgctcacctccctcctctgcaccatgactacctgcagccgccagttcacctcctccagctccatgaagggctcctgcggcatcgggggcggcatcggggcgggctccagccgcatctcctccgtcctggccggagggtcctgccgcgcccccaacacctacgggggcggcctgtctgtctcatcctcccgcttctcctctgggggagcctatgggttggggggcggctatggcggtggcttcagcagcagcagcagcagctttggtagtggctttgggggaggatatggtggtggccttggtgctggcttgggtggtggctttggtggtggctttgctggtggtgatgggcttctggtgggcagtgagaaggtgaccatgcagaacctcaatgaccgcctggcctcctacctggacaaggtgcgtgctctggaggaggccaacgccgacctggaagtgaagatccgtgactggtaccagaggcagcggcctgctgagatcaaagactacagtccctacttcaagaccattgaggacctgaggaacaaggtgggtgaatgggcagcagaaggcaccattccagctagctccttctgggaacaattcatgccccaggccgctgagaccttaagatttctctataggacagagtccaccccagatcccttctttcgaggtcttggatgccctaagactgatcagtgagaagatgctttcccttccccaggcctcctcatccccttctgatctcaaatcctcagaccatgtgagatcagtgattcctatccttacattttttagaggaagcagttgaagcttcgagaggtgctgtgaccagctgcaggtcacatagcaaattaatggcagagcaaggctggggcccttgtgcctaccttccagcacaggaggcagctacttgttctccagcacaggggaggagtgaggctctaacgggaccaggcaagacatccaaaccactcattagctcactagtctgggctgtggttgccgccgcccataagccttggtacaggctggtccctccccacagccaggcgggcatggagagcctgcagagacaattagtgtggtcccttgatgtgccctgcacagagagagcctggcaggcttgtgccctgactctagccccctcctccctgctcccacattacttgggagccctccctgctggagtctgttgggctctaatgacttgcatggattagggaaattcaagtgatgaggtggggaaatccaaccagactcaggggccaatatatcttcttattcttcccctgagtcctcttttctaatcccctgtgttagttgggttttatctcttcacaaagttccacttgaagtcccatggcctgtgagcttgaaaaggaatgtgcatatctgcagaggactggcagggctggcctgatgcagacagaagagaggtcagctcaggaaggagggctagggagcctcagattattctcctcacctggaggtggggaacttgaagccccaagacccattaggttttgcccagcaagacactggcagaattgggaccagaactcctgggctttcgattctaagcccggggctgccatctaccccctctgttgaccatgagttagcaaagtcttaggacaggcctggggcatctgttttcctttgggctgctatggtcaagttttgtgggggaaaagggggattcaggcaagaacatgaagcaagagcttaatgtaggctacagtgaagtccagcttgtgaagtccatttgacaaattacctgtgccttttccatcctgcagattctcacagccacagtggacaatgccaatgtccttctgcagattgacaatgcccgtctggccgcggatgacttccgcaccaagtgagtttgaaatggtgggccagaacatccagtgtccccagagtagggcatttttggagcagtgtttcccaaatagaactagccagtaccaggataggtgcatgaaaactccctggggtgcttataaaagaataagactcttgggccccacccttggagttttgattcagctatttatagcaggttacctgggtgattctggtccacagccaggtttcagaaccgctgctttagggagaggcactttccacttccccagctgcccttgaagtataggaaggaatcatagttggaggacttctgcattatttgttggctgaagctagaagtgcaaccccctcctgatttctgcagcaagatgaactgccttatccccagcccgcaggaatgttcatatctgagcaatcaatgggcactgtgttcaaccacgccatttttcaagattggctccttaaaccacccacaaggcaccagctctgggagaagctgcagggagaagagaacaaagccctcgctgtgatcaggatgggtgtctcataccttttctctggggtcattccaggtatgagacagagttgaacctgcgcatgagtgtggaagccgacatcaatggcctgcgcagggtgctggacgaactgaccctggccagagctgacctggagatgcagattgagagcctgaaggaggagctggcctacctgaagaagaaccacgaggaggtgagaactatatggaaaagtcagcttaaaagaaatgcagggaggctgggtacagtggtgcgtgcccatagtcccagctacttgggaggctgagacaggaggatcacttgaacacaggagtttgagtccagcctgggcaacaaggttagaccctgtccaaaaaaaaaaaaaaaaaaaaaaaaaaagagagagagagagagagagattgagagagagagagagaagggagagtcgagatagaattgtgatggtgggagggcagtattcaggcctaaggaacaccaatccgctgccatggtggaactcctgactgtggactgtccctggcttgcaggagatgaatgccctgagaggccaggtgggtggagatgtcaatgtggagatggacgctgcacctggcgtggacctgagccgcattctgaacgagatgcgtgaccagtatgagaagatggcagagaagaaccgcaaggatgccgaggaatggttcttcaccaaggtgggtgtcatttgaggtggaaggaacccagaccacctgccttctggggccttctggtgtgaatggcattctcttttttgcagacagaggagctgaaccgcgaggtggccaccaacagcgagctggtgcagagcggcaagagcgagatctcggagctccggcgcaccatgcagaacctggagattgagctgcagtcccagctcagcatggtaggaatagtgccaggaagggtggtgcacccaggactggcagggagagaacggccacactcactaatcgttgattcccttccctccctcacagaaagcatccctggagaacagcctggaggagaccaaaggtcgctactgcatgcagctggcccagatccaggagatgattggcagcgtggaggagcagctggcccagctccgctgcgagatggagcagcagaaccaggagtacaagatcctgctggacgtgaagacgcggctggagcaggagatcgccacctaccgccgcctgctggagggcgaggacgcccagtgagtcttggccctccccttagtccgccccccccatggcactctcacggccccaccatgtatctaatgatcctgtccttttctattttcacagcctctcctcctcccagttctcctctggatcgcagtcatccagagatggtaagaccctcctcctctgcaggcctgggctccaggccaccctctgtaccccaagcaggtctaggcattggctaggggctccgtgaggggctgagctctagtgctgtcacccagtttcccttgtgaacctccttgggtggaagaagctattttctaaaccctccttagggctaggagaggcagcccccacctcttgccttctacgtggtgtctgtggcagatcctattagctgttgtggtcagcaccatgaacaagggccctacagcggtcttcccactgagaccactccattgggtgaatatggatggaaccagccaggtgtgagctcttaggaagctctaatctgagggcaaagactctgtctctgacctttgggagccctcgtctgaaagaaatgtgttgatggtatcagtgcttgggcaacagcagggagtgaagcagtaatcaggggagagggcaatggggagccagtttgagtttcctcaccttcttggcctccttactcctgattagtccattgtctgtccacctctggtaacgtcctcttcccacctcttccccagtgacctcctccagccgccaaatccgcaccaaggtcatggatgtgcacgatggcaaggtggtgtccacccacgagcaggtccttcgcaccaagaactgaggctgcccagccccgctcaggcctaggaggccccccgtgtggacacagatcccactggaagatcccctctcctgcccaagcacttcacagctggaccctgcttcaccctcaccccctcctggcaatcaatacagcttcattatctgagttgcataattctcgcctctctctggtcattgttaggagtgggggtggggagaaagtgggagagcatctctttggagcttgtcatgcacctggctatggcccctgggactgggagaaaagtcctgggggtgggttgggctcaggtcccaggatatctttcgccatctcagaagacacagatagatgtgtgtaccaggtcatatgtggtgtctcctagggtacggagggatattcattcatttactcactcattttcatgtgtgtccattcattcaccagatattgagtgcctctatgtcaggcactatgttaggttaaggattcctgatgtttttgtgtatcagggattccttggagaatattgaaagctatagatctttccttctgccccctaccttcaaataagcatacatacatttgcatacatgtcatggggttcatgggtctcctagagctccttaccggagt

SEQ ID NO: 999 - DNA, 12847 bp, Homo sapiens
  Genbank Accession No. J00153
ggatccccggggctctgggcggtgtgggcgtagtgaagccccacgcagccgccctcctccccggtcactgactggtcctgcaggctcttcacggtgtaccccagcaccaaggtctacttcccgcacctgagcgcctgccaggacgacgcagctgctgagccacgggagcgcatctgcggctgtggcgcggcggtgcagcacgtggacaacctgcgcgcctgagcccgctggcggacctgacgctcgttgcgcgtggacccagccaactttccggtgaggcctttccggccggggcaatggtgcatcgcctagccgggatgggggggctctgggggtccctagcggggcagaccccgtctcaccggccccttctcctgcagctgctaatccagtgtttccacgtcgtgctggcctcccacctgcaggacgagttcaccgtgcaaatgcaagcggcgtgggacaagttcctgactggtgtggccgtggtgctgaccgaaaaatacgctgagccctgtgctgcgaggccttggtctgtgcatgtcaataaacagaggcccgaaccatctgcccctgcctgtgtggtctttggggagctagcaaagcgaggtcactattgttggccagtaagctcagggacctaaagggagcctcctagaactctcaaatgcgccccacccccggaggtttgtcctcccatggcgaggagtgcgatggggcagagggagcagtgtgatatggcgggggtagagagggtggccttcgacttcaaacccttgactcgggcttcgaaccatactcgttcgcaaagcagttccccattcatgcatttattcagttcattccttccctccatccccatttcctgctgggacctgtagatgctaatcctggccctttttgcagagagatgcagaaactgaggtcccagagccaaatgtgcaacctaattcgttggccagagcagagggccgcagacctgttcctttccccttccttcccccatggacacttcctcagtggcaaacctgcgctagcctggttagccctccctgtgaccctgcagccctggggatgaggtcgggaggaagacctcagtggccacaatttggcagacagagaggtttagtcttccagcctgctcaatgacaagctgtgcgaccctgggctgtcccagagctctaggcctttacctatcgaatagaaaaacagcgtccaactcatgagatttttgaaataatttttgaaatcataacacagggtgggtgcctgcagggacgttgccaccccacccctccacccagccccagctgccgtgtctcaatctctgcaggtgcccaggccaaggcattcccttccccaggctccctcttctccctccccaaggattgggaagggaatcttagggctccaccccaggcttttcagacaaagaataggggctcaggaaagattgggaccttggagttctccaatccctaatagggttgggtgtgggttgggcatcctgggtgtgtgtggggagcacctggaccaggcctggcacccaggtctgacctggcagtcagcaatgaggtctgaagagagctgctggaagtggagccctgactgtgagtcggccaaactccccccagcagtcagtgccacagacctgttgccctgcactgcctgggaccccagcccggtagtttggagaacttggcccctcgttatctacatcccccaagtgtttttttgtttttgggggtttttttttttttttttttgctttgtttttgtttttgagataggcccttgctctgacaccccggctggagtgcagtggcaagttttggctcactgcagcctcaacctcctgggttcaagcgattctcctgcctctgtctcccgtgtagctgggattacaggcatgggccgccattcctggctaatttatgtatttttaatagagacacagtttcaccatgttgatcaggctggtctcaaactcctgacctcaagtgatctgccctcctggtctcccaaagtgctgggatgacaggcgtgagccaccacacccagcccccgcaactgtttacatggataattaacaagctttttgtcccaggcagagtttggtgtgaaagcagcttatgtttcactttggaaaaactgtgctcttctccccatccaggaagctgcctgggtctgggccatatgtggataccttatgggtataagctgctcaggaccctgtgtggaagctcaggacaatgccagcgggaaggctaccatgtggagagctgtctctgtttgggcaggactaagagacgcagggaaccttgggaacctgtctactctcactcactcctcctcccctttccttccaggcacctctgcaacttgccagccaatgaccctgcatcccaggcataagagctcctactctcccccacctttcacttttgagcttacacagactcagaaattaagctgccgtggtgctgtctcctgaggacaaggctaacaccaaggcggtctgggagaaagttggcgaccacactgctggctatgccacggaggccctggagaggcaagaaccctcctctccctgctcacaccttgggtccaacgcccactccagggctccactggccacccctaactattcttaccctggacccagcccccagcccctcactctttgcttccccctgaagcatgttcctgaccttcctctcacttggccctgagttatggctcagcccagatcaagaaacaatgcaagtaggtggccgacacgctgaccaatgccgtggtccacttagatgacatgcccaatgatgtgtctgaggtgaggaagctgcatgtccacgagctgtgggtggacccaggcaacatcagggagagctttgggctgggaggaatctagggtgtgggggcagctggccttcctcataggacagaccctcccacgcgttcagggaggtggagcacaggtggcagtagtatctgcatcccctgactctctctccacagttcctgggtaaatgcctgctggtgacctaggcctgccacacccttcccggtttacccatgtggtgcctccatggacaaattatttgcttttgtgagtgctgtgttgacctaaaaacaccattaagctagagcattggtggtcatgccccctgcctgctgggcctcccaccaggcccgcctcccctccctgccccagcacttcctgatctttgaatgaagtccgagtaggcagcagcctgtgtgtgcctgggttctctctgtcccggaatgtgccaacagtggaggtgtttacctgtctcagaccaaggacctctctgcagctgcatggggctggggagggagaactgcagggagtatgggaggggaagctgaggtgggcctgctcaagagaaggtgctgaaccatcccctgtcctgagaggtgccaggcctgcaggcagtggctcagaagctggggaggagagaggcatccagggttctactcagggagtcccagcatcgccaccctcctttgaaatctccctggttgaacccagttaacatacgctctccatcaaaacaaaacgaaacaaaacaaactagcaaaataggctgtccccagtgcaagtgcaggtgccagaacatttctctcattcccaccccttcctgccagagggtaggtggctggagtgagggtgctggccctactcacacttcctgtgtcatggtgaccctctgagagcagcccagtcagtggggaaggaggaaggggctgggatgctcacagccggcagcccacacctagggagactcttcagcagagcaccttgcggccttactcctgcacgtctcctgcagtttgtaaggtgcattcagaactcactgtgtgcccagccctgagctcccagctaattgccccacccagggcctctgggacctcctggtgcttctgcttcctgtgctgccagcaacttctggaaacgtccctgtccccggtgctgaagtcctggaatccatgctgggaagttgcacagcccatctggctctcagccagcctaggaacacgagcagcacttccagcccagcccctgccccacagcaagcctccccctccacactcacagtactgaattgagctttgggtagggtggagaggaccctgtcaccgcttttcttctggacatggacctctctgaattgttggggagttccctccccctctccaccacccactcttcctgtgcctcacagcccagagcattgttatttcaacagaaacactttaaaaaataaactaaaatccgacaggcacggtggctcacacctgtaatcccagtactttgggaggctgaggcgagaggatcacctgaggtcgggagtttgagaccagcctgaccaatatggagaaaccccagttatactaaaaatacaaaattagctgggtgtggtggcgcatgcctgtaatcctagctactaggaaggctgaggcaggagaatcgcttgaacccgggaggtggaggttgaggtgagccgagatcacgccattgcactccagcctgggcaacaagagcaaaactccgtctcaaaaaataaataaataaataaataaataaactaaaatctatccatgctttcacacacacacacacacacacacacacacaccttttttgtgttactaaagtaggagagtgtctctctttcctgtctcctcacacccacccccagaagagaccaaaatgaagggtttggaactcacgccatgggccccatcccatgctgagggaacacagctacatctacaactactgccacagcgtctctttttggacacccctaccatcatactgtagatacccgtgtacaaccttcctattctcagtgaagtgtctcccctgcatccctttcagccagttcattcagctctgctcgcccattccacagtctcactgattattactatgtttccatcatgatccccccaaaaaatcatgactttatttttttatttttattattattattatttttttttttttttttgagacggagtctcgctctgtgacccaggctggagtgcagtggcaaatctcggctcactgcaagctccacctcgcaggttcacgccattctcctccctcagcctcccgagtcgctgagtagctgggctacagcgccccccactagtcgtggctaattttttctttttttaatagagacagagtttcactgcattagcgaggatggtctcgatctcctgacctcgcatctgccagcctcagccttccaatgtgctgggattacagcgtgagccaacgcgcccggccttatatatttatttttttgagacagagtctcgctgtgtcgtcaggctagagtgctgtggcacgatctcggctcactgcaacctccaactccctggttcaaaggattctccagcctccacctcccgagtagctgggattacaggcgtgcaccaccacaccagctaatttttgtatttttagtagagacggggtttctccatgttggtcagcctggtctcgaactcccgaccacagctgatcccacccacctcggcctcccaaagtgctgggattccaggcgtgcgccgagcctggccaaaccatcacttttcatgagcagggatgcacccactggactcctggacctcccaccctccccctcgccaagtccaccccttccttcctcaccccacatcccctcacctacattctgcaacacaggggccttctctcccctgtcctttccctacccagagccaggtttgtttatctgtttacaaccagtatttacctagcaagtcttccatcagatagcatttggagagctgggggtgtcacagtgaaccacgacctctaggccagtgggagagtcagtcacacaaactgtgagtccatgacttggggcttagccagtacccaccaccccacgcgccaccccacaaccccgggtagaggagtctgaatctggagccgcccccagcccagccccgtgctttttgcgtcctggtgtttgttccttcccggtgcctgtcactcaagcacactagtgactatcgccagagggaaagggagctgcaggaagcgaggctggagagcaggaggggctctgcgcagaaattcttttgagttcctatgggccagggcgtccgggtgcgcgcattcctctccgccccaggattgggcgaagccctccggctcgcactcgctcgcccgtgtgttccccgatcccgctggagtcgatgcgcgtccagcgcgtgccaggccggggcgggggtgcgggctgactttctccctcgctagggacgctccggcgcccgaaaggaaagggtggcgctgcgctccggggtgcacgagccgacagcgcccgaccccaacgggccggccccgccagcgccgctaccgccctgcccgggcgagcgggatgggcgggagtggagtggcgggtggagggtggagacgtcctggcccccgccccgcgtgcacccccaggggaggccgagcccgccgcccggccccgcgcaggccccgcccgggactcccctgcggtccaggccgcgccccgggctccgcgccagccaatgagcgccgcccggccgggcgtgcccccgcgccccaagcataaaccctggcgcgctcgcggcccggcactcttctggtccccacagactcagagagaacccaccatggtgctgtctcctgccgacaagaccaacgtcaaggccgcctggggtaaggtcggcgcgcacgctggcgagtatggtgcggaggccctggagaggtgaggctccctcccctgctccgacccgggctcctcgcccgcccggacccacaggccaccctcaaccgtcctggccccggacccaaaccccacccctcactctgcttctccccgcaggatgttcctgtccttccccaccaccaagacctacttcccgcacttcgacctgagccacggctctgcccaggttaagggccacggcaagaaggtggccgacgccctgaccaacgccgtggcgcacgtggacgacatgcccaacgcgctgtccgccctgagcgacctgcacgcgcacaagcttcgggtggacccggtcaacttcaaggtgagcggcgggccgggagcgatctgggtcgaggggcgagatggcgccttcctctcagggcagaggatcacgcgggttgcgggaggtgtagcgcaggcggcggctgcgggcctgggccgcactgaccctcttctctgcacagctcctaagccactgcctgctggtgaccctggccgcccacctccccgccgagttcacccctgcggtgcacgcctccctggacaagttcctggcttctgtgagcaccgtgctgacctccaaataccgttaagctggagcctcggtagccgttcctcctgcccgatgggcctcccaacgggccctcctcccctccttgcaccggcccttcctggtctttgaataaagtctgagtgggcggcagcctgtgtgtgcctgggttctctctgtcccggaatgtgccaacaatggaggtgtttacctgtctcagaccaaggacctctctgcagctgcatggggctggggagggagaactgcagggagtatgggaggggaagctgaggtgggcctgctcaagagaaggtgctgaaccatcccctgtcctgagaggtgccaggcctgcaggcagtggctcagaagctggggaggagagaggcatccagggttctactcagggagtcccagcatcgccaccctcctttgaaatctccctggttgaacccagttaacatacgctctccatcaaaacaaaacgaaacaaaacaaactagcaaaataggctgtccccagtgcaagtgcaggtgccagaacatttctctcattcccaccccttcctgccagagggtaggtggctggagtgagggtgctggccctactcacacttcctgtgtcacggtgaccctctgagagcagcccagtcagtggggaaggaggaaggggctgggatgctcacagccggcagcccacacctagggagactcttcagcagagcaccttgcggccttactcctgcacgtctcctgcagtttgtaaggtgcattcagaactcactgtgtgcccagccctgagctcccagctaattgccccacccagggcctctgggacctcctggtgcttctgcttcctgtgctgccagcaacttctggaaacgtccctgtccccggtgctgaagtcctggaatccatgctgggaagttgcacagcccatctggctctcagccagcctaggaacatgagcagcacttccaacccagtccctgccccacagcaagcctccccctccacactcacagtactggattgagctttggggagggtggagaggaccctgtcaccgctttccttctggacatggacctctctgaattgttggggagttccctccccctctccaccacccgctcttcctgcgcctcacagcccagagcattgttatttcagcagaaacactttaaaaaataaactaaaatccgacaggcacggtggctcacgcctgtaatcccagcactttgggaggccgaggtgggaggatcacctgaggtcgggagtttgagaccaccctgatcaacatgtagaaaccccatctatactaaaaatacaaaatcagccgggcatggtggcccatgcctgtaaacccacctactccggaggctgaggcaggagaatcattttaaccaaggaggcagaggttgcagtgagctaagatcacaccattgcactccagcctggaaaacaacagcgaaactccgcctcaaaaaaaaaaaagcccccacatcttatcttttttttttccttcaggctgtgggcagagtcagaaagtcagaagagggtggcagacagggaggggaaatgagaagatccaacgggggaagcattgctaagctggtcggagctacttccttctctgcccaaggcagcttaccctggcttgctcctggacacccagggcagggcctgagtaagggcctggggagacagggcagggagcaggctgaagggtgctgacctgatgcactcctcaaagcagatcttctgccagacccccaggaaatgacttatcagtgatttctcaggctgttttctcctcagtaccatccccccaaaaaacatcacttttcatgcacagggatgcacccactggcactcctgcacctcccacccttccccagaagtccaccccttccttcctcaccctgcaggagctggccagcctcatcaccccaacatctccccacctccattctccaaccacagggcccttgtctcctctgtcctttcccctccccgagccaagcctcctccctcctccacctcctccacctaatacatatccttaagtctcacctcctccaggaagccctcagactaaccctggtccccttgaatgcctcgtccacacctccagacttcctcagggcctgtgatgaggtctgcacctctgtgtgtacttgtgtgatggttagaggactgcctacctcccagaggaggttgaatgctccagccggttccagctattgctttgtttacctgtttaaccagtatttacctagcaagtcttccatcagatagcatttggagagctgggggtgtcacagtgaaccacgacctctaggccagtgggagagtcagtcacacaaactgtgagtccatgacttggggcttagccagcacccaccaccccacgcgccaccccacaaccccgggtagaggagtctgaatctggagccgcccccagcccagccccgtgctttttgcgtcctggtgtttattccttcccggtgcctgtcactcaagcacactagtgactatcgccagagggaaagggagctgcaggaagcgaggctggagagcaggaggggctctgcgcagaaattcttttgagttcctatgggccagggcgtccgggtgcgcgcattcctctccgccccaggattgggcgaagccctccggctcgcactcgctcgcccgtgtgttccccgatcccgctggagtcgatgcgcgtccagcgcgtgccaggccggggcgggggtgcgggctgactttctccctcgctagggacgctccggcgcccgaaaggaaagggtggcgctgcgctccggggtgcacgagccgacagcgcccgaccccaacgggccggccccgccagcgccgctaccgccctgcccgggcgagcgggatgggcgggagtggagtggcgggtggagggtggagacgtcctggcccccgccccgcgtgcacccccaggggaggccgagcccgccgcccggccccgcgcaggccccgcccgggactcccctgcggtccaggccgcgccccgggctccgcgccagccaatgagcgccgcccggccgggcgtgcccccgcgccccaagcataaaccctggcgcgctcgcggcccggcactcttctggtccccacagactcagagagaacccaccatggtgctgtctcctgccgacaagaccaacgtcaaggccgcctggggtaaggtcggcgcgcacgctggcgagtatggtgcggaggccctggagaggtgaggctccctcccctgctccgacccgggctcctcgcccgcccggacccacaggccaccctcaaccgtcctggccccggacccaaaccccacccctcactctgcttctccccgcaggatgttcctgtccttccccaccaccaagacctacttcccgcacttcgacctgagccacggctctgcccaggttaagggccacggcaagaaggtggccgacgccctgaccaacgccgtggcgcacgtggacgacatgcccaacgcgctgtccgccctgagcgacctgcacgcgcacaagcttcgggtggacccggtcaacttcaaggtgagcggcgggccgggagcgatctgggtcgaggggcgagatggcgccttcctcgcagggcagaggatcacgcgggttgcgggaggtgtagcgcaggcggcggctgcgggcctgggccctcggccccactgaccctcttctctgcacagctcctaagccactgcctgctggtgaccctggccgcccacctccccgccgagttcacccctgcggtgcacgcctccctggacaagttcctggcttctgtgagcaccgtgctgacctccaaataccgttaagctggagcctcggtggccatgcttcttgccccttgggcctccccccagcccctcctccccttcctgcacccgtacccccgtggtctttgaataaagtctgagtgggcggcagcctgtgtgtgcctgagttttttccctcagaaacgtgccagcatgggcgtggacagcagctgggacacacatggctagaacctctctgcagctggatagggtaggaaaaggcaggggcgggaggaggggatggaggagggaaagtggagccaccgcgaagtccagctggaaaaacgctggaccctagagtgctttgaggatgcatttgctctttcccgagttttattcccagacttttcagattcaatgcaggtttgctgaaataatgaatttatccatctttacgtttctgggcactcttgtgccaagaactggctggctttctgcctgggacgtcactggtttcccagaggtcctcccacatatgggtggtgggtaggtcagagaagtcccactccagcatggctgcattgatcccccatcgttcccactagtctccgtaaaacctcccagatacaggcacagtctagatgaaatcaggggtgcggggtgcaactgcaggccccaggcaattcaataggggctctactttcacccccaggtcaccccagaatgctcacacaccagacactgacgccctggggctgtcaagatcaggcgtttgtctctgggcccagctcagggcccagctcagcacccactcagctcccctgaggctggggagcctgtcccattgcgactggagaggagagcggggccacagaggcctggctagaaggtcccttctccctggtgtgtgttttctctctgctgagcaggcttgcagtgcctggggtatcagagggagggttcccggagctggtagccataaagccctggccctcaactgataggaatatcttttattccctgagcccatgaatcacccttggtaaacacctatggcaggccctctgcctgcgtttgtgatgtccttcccgcagcctgtgggtacagtatcaactgtcaggaagacggtgtcttcgttatttcatcaggaagaatggaggtctgacctaaaggtagaaatatgtcaaatgtacagcagagggctggttggagtgcagcgctttttacaattaattgatcagaaccagttataaatttatcatttccttctccactcctgctgcttcagttgactaagcctaagaaaaaattataaaaattggccgggcgcggtggctcacacctgtaattgcagcactttgccaggcttaggcaggtggatcacctgaagtcaggggttcgagaccagcctagccaacatagtgaaaccctgtctctactaaaaagacaaaaattgtccaggtgtgatgactcatgcctgtaaacctggcactttgggaggcggaggttgtagtgagtcaagatcgcgccatcgcactccagcttgggcaacaagagcgaaactctgtctcaaaaaaaaatttaatctaatttaatttaatttaaaaattagcacggtggttgggcacagtggcctcacgcctgtaatcccagcactttgggaagccaaggtgggcagatcacaaggtcaggggaattc

SEQ ID NO: 1000 - DNA, 809 bp, Homo sapiens
  Genbank Accession No. J02611
atgcctgtcttcatcttgaaagaaaagctccaggtcccttctccagccacccagccccaagatggtgatgctgctgctgctgctttccgcactggctggcctcttcggtgcggcagagggacaagcatttcatcttgggaagtgccccaatcctccggtgcaggagaattttgacgtgaataagtatctcggaagatggtacgaaattgagaagatcccaacaacctttgagaatggacgctgcatccaggccaactactcactaatggaaaacggaaagatcaaagtgttaaaccaggagttgagagctgatggaactgtgaatcaaatcgaaggtgaagccaccccagttaacctcacagagcctgccaagctggaagttaagttttcctggtttatgccatcggcaccgtactggatcctggccaccgactatgagaactatgccctcgtgtattcctgtacctgcatcatccaactttttcacgtggattttgcttggatcttggcaagaaaccctaatctccctccagaaacagtggactctctaaaaaatatcctgacttctaataacattgatgtcaagaaaatgacggtcacagaccaggtgaactgccccaagctctcgtaaccaggttctacagggaggctgcacccactccatgttacttctgcttcgctttcccctaccccacccccccccataaagacaaaccaatcaaccacgacaaaggaagttgacctaaacatgtaaccatgccctaccctgttaccttgctagctgcaaaataaacttgttgctgacctgc

SEQ ID NO: 1001 - DNA, 1230 bp, Homo sapiens
  Genbank Accession No. J02876
gaatcaattcctccaaaccgcaagaacagtaacatttattattcaaaaaaacaaaaaccagattataggatatgacatttggtataacaataatgttattgaaaaatggaaaaatgatccattaatggcttgggctaaaaattcgggggacagcctaggggcctggatctattgcctacttagagagaggccaactcagacacagccgtgtatgctcccagcagcaacggaggttcacgtccgcctgcagggacagaaagacatggtctggaaatggatgccacttctgctgcttctggtctgtgtagccaccatgtgcagtgcccaggacaggactgatctcctcaatgtctgtatggatgccaagcaccacaagacaaagccaggtcctgaggacaagctgcatgaccaatgcagtccctggaagaagaatgcctgctgcacagccagcaccagccaggagctgcacaaggacacctcccgcctgtacaactttaactgggaccactgcggcaagatggagcccgcctgcaagcgccacttcatccaggacacctgtctctatgagtgctcacccaacctggggccctggatccagcaggtgaatcagacgtggcgaaaagaacgcttcctggatgtgcccttatgcaaagaggactgtcagcgctggtgggaggattgtcacacctcccacacgtgcaagagcaactggcacagaggatgggactggacctcaggagttaacaagtgcccagctggggctctctgccgcacctttgagtcctacttccccactccagctgccctttgtgaaggcctctggagtcactcatacaaggtcagcaactacagccgagggagcggccgctgcatccagatgtggtttgattcagcccagggcaaccccaacgaggaagtggcgaggttctatgctgcagccatgcatgtgaatgctggtgagatgcttcatgggactgggggtctcctgctcagtctggccctgatgctgcaactctggctccttggctgagttcagtcctcccagactacctgccctcagcttggataaccaggctgggctcagctcagctcccacaaatgacagccccttaagcatgcttctattagtcacctaaccctctgtcacccagtctgttgctgctccatggtggggccaagagtcacttctaataaacagactgttttctaataaaaaaaaaaaaaaaaaaa

SEQ ID NO: 1002 - DNA, 5416 bp, Homo sapiens
  Genbank Accession No. J03464
gtgtcccatagtgtttccaaacttggaaagggcgggggagggcgggaggatgcggagggcggaggtatgcagacaacgagtcagagtttccccttgaaagcctcaaaagtgtccacgtcctcaaaaagaatggaaccaatttaagaagccagccccgtggccacgtcccttcccccattcgggccctcctctgcgcccccgcaggctcctcccagctgtggctgcccgggcccccagccccagccctcccattggtggaggcccttttggaggcaccctagggccagggaaacttttgccgtataaatagggcagatccgggatttgttattttagcaccacggcagcaggaggtttcggctaagttggaggtactggccacgactgcatgcccgcgcccgccatgtgatacctccgccggtgacccagggctctgcgacacaaggagtcgcatgtctaagtgctagacatgctcagctttgtggatacgcggactttgttgctgcttgcagtaaccttatgcctagcaacatgccaatctttacaagaggaaactgtaagaaagggcccagccggagatagaggaccacgtggagaaaggggtccaccaggccccccaggcagagatggtgaagatggtcccacaggccctcctggtccacctggtcctcctggcccccctggtctcggtgggaactttgctgctcagtatgatggaaaaggagttggacttggccctggaccaatgggcttaatgggacctagaggcccacctggtgcagctggagccccaggccctcaaggtttccaaggacctgctggtgagcctggtgaacctggtcaaactggtcctgcaggtgctcgtggtccagctggccctcctggcaaggctggtgaagatggtcaccctggaaaacccggacgacctggtgagagaggagttgttggaccacagggtgctcgtggtttccctggaactcctggacttcctggcttcaaaggcattaggggacacaatggtctggatggattgaagggacagcccggtgctcctggtgtgaagggtgaacctggtgcccctggtgaaaatggaactccaggtcaaacaggagcccgtggtcttcctggtgagagaggacgtgttggtgcccctggtccagctggtgcccgtggaagtgatggaagtgtgggtcccgtaggtcctgctggtcctaatgggtctgctggccctccaggtttcccaggtgcccctggtcccaagggtgaaattggagctgttggtaacgctggtcctactggacccgccggtccccgtggtgaagtgggtcttccaggcctctccggccccgttggacctcctggtaatcctggagcaaacggccttactggtgccaagggtgctgctggccttcccggcgttgctggggctcccggcctccctggaccccgcggtattcctggccctcctggtgctgccggtactactggtgccagaggacttgttggtgagcctggtccagctggctccaaaggagagagcggtaacaagggtgagcccggctccgctggtccccaaggtcctcctggtcccagtggtgaagaaggaaagagaggccctaatggggaagctggatctgccggccctccaggacctcctgggctgagaggtagtcctggttctcgtggtcttcctggagctgatggcagagctggcgtcatgggccctcctggtagtcgtggtgcaagtggccctgctggagtccgaggacctaatggagatgctggtcgccctggggagcctggtctcatgggacccagaggtcttcctggttcccctggaaatatcggccccgctggaaaagaaggtcctgtcggcctccctggcatcgacggcaggcctggcccaattggccccgttggagcaagaggagagcctggcaacattggattccctggacccaaaggccccactggtgaccctggcaaaaacggtgataaaggtcatgctggtcttgctggtgctcggggtgctccaggtcctgatggaaacaatggtgctcagggacctcctggaccacagggtgttcaaggtggaaaaggtgaacagggtcccgctggtcctccaggcttccagggtctgcctggcccctcaggtcccgctggtgaagttggcaaaccaggagaaaggggtctccatggtgagtttggtctccctggtcctgctggtccaagaggggaacgcggtcccccaggtgagagtggtgctgccggtcctactggtcctattggaagccgaggtccttctggacccccagggcctgatggaaacaagggtgaacctggtgtggttggtgctgtgggcactgctggtccatctggtcctagtggactcccaggagagaggggtgctgctggcatacctggaggcaagggagaaaagggtgaacctggtctcagaggtgaaattggtaaccctggcagagatggtgctcgtggtgctcatggtgctgtaggtgcccctggtcctgctggagccacaggtgaccggggcgaagctggggctgctggtcctgctggtcctgctggtcctcggggaagccctggtgaacgtggcgaggtcggtcctgctggccccaacggatttgctggtccggctggtgctgctggtcaaccgggtgctaaaggagaaagaggaggcaaagggcctaagggtgaaaacggtgttgttggtcccacaggccccgttggagctgctggcccagctggtccaaatggtccccccggtcctgctggaagtcgtggtgatggaggcccccctggtatgactggtttccctggtgctgctggacggactggtcccccaggaccctctggtatttctggccctcctggtccccctggtcctgctgggaaagaagggcttcgtggtcctcgtggtgaccaaggtccagttggccgaactggagaagtaggtgcagttggtccccctggcttcgctggtgagaagggtccctctggagaggctggtactgctggacctcctggcactccaggtcctcagggtcttcttggtgctcctggtattctgggtctccctggctcgagaggtgaacgtggtctacctggtgttgctggtgctgtgggtgaacctggtcctcttggcattgccggccctcctggggcccgtggtcctcctggtgctgtgggtagtcctggagtcaacggtgctcctggtgaagctggtcgtgatggcaaccctgggaacgatggtcccccaggtcgcgatggtcaacccggacacaagggagagcgcggttaccctggcaatattggtcccgttggtgctgcaggtgcacctggtcctcatggccccgtgggtcctgctggcaaacatggaaaccgtggtgaaactggtccttctggtcctgttggtcctgctggtgctgttggcccaagaggtcctagtggcccacaaggcattcgtggcgataagggagagcccggtgaaaaggggcccagaggtcttcctggcttcaagggacacaatggattgcaaggtctgcctggtatcgctggtcaccatggtgatcaaggtgctcctggctccgtgggtcctgctggtcctaggggccctgctggtccttctggccctgctggaaaagatggtcgcactggacatcctggtacggttggacctgctggcattcgaggccctcagggtcaccaaggccctgctggcccccctggtccccctggccctcctggacctccaggtgtaagcggtggtggttatgactttggttacgatggagacttctacagggctgaccagcctcgctcagcaccttctctcagacccaaggactatgaagttgatgctactctgaagtctctcaacaaccagattgagacccttcttactcctgaaggctctagaaagaacccagctcgcacatgccgtgacttgagactcagccacccagagtggagcagcggttactactggattgaccccaaccaaggatgcactatggaagccatcaaagtatactgtgatttccctaccggcgaaacctgtatccgggcccaacctgaaaacatcccagccaagaactggtataggagctccaaggacaagaaacacgtctggctaggagaaactatcaatgctggcagccagtttgaatataatgttgaaggagtgacttccaaggaaatggctacccaacttgccttcatgcgcctgctggccaactatgcctctcagaacatcacctaccactgcaagaacagcattgcatacatggatgaggagactggcaacctgaaaaaggctgtcattctacagggctctaatgatgttgaacttgttgctgagggcaacagcaggttcacttacactgttcttgtagatggctgctctaaaaagacaaatgaatggggaaagacaatcattgaatacaaaacaaataagccatcacgcctgcccttccttgatattgcacctttggacatcggtggtgctgaccatgaattctttgtggacattggcccagtctgtttcaaataaatgaactcaatctaaattaaaaaagaaagaaatttgaaaaaactttctctttgccatttcttcttcttcttttttaactgaaagctgaatccttccatttcttctgcacatctacttgcttaaattgtgggcaaaagagaaaaagaaggattgatcagagcattgtgcaatacagtttcattaactccttcccccgctcccccaaaaatttgaatttttttttcaacactcttacacctgttatggaaaatgtcaacctttgtaagaaaaccaaaataaaaattgaaaaataaaaaccataaacatttgcaccacttgtggcttttgaatatcttccacagagggaagtttaaaacccaaacttccaaaggtttaaactacctcaaaacactttcccatgagtgtgatccacattgttaggtgctgacctagacagagatgaactgaggtccttgttttgttttgttcataatacaaaggtgctaattaatagtatttcagatacttgaagaatgttgatggtgctagaagaatttgagaagaaatactcctgtattgagttgtatcgtgtggtgtattttttaaaaaatttgatttagcattcatattttccatcttattcccaattaaaagtatgcagattatttgcccaaagttgtcctcttcttcagattcagcatttgttctttgccagtctcattttcatcttcttccatggttccacagaagctttgtttcttgggcaagcagaaaaattaaattgtacctattttgtatatgtgagatgtttaaataaattgtgaaaaaaatgaaataaagcatgtttggttttccaaaagaacatat

SEQ ID NO: 1003 - DNA, 2700 bp, Homo sapiens
  Genbank Accession No. J04076
tctgacactccaggtagcgagggagttgggtctccaggttgtgcgaggagcaaatgatgaccgccaaggccgtagacaaaatcccagtaactctcagtggttttgtgcaccagctgtctgacaacatctacccggtggaggacctcgccgccacgtcggtgaccatctttcccaatgccgaactgggaggcccctttgaccagatgaacggagtggccggagatggcatgatcaacattgacatgactggagagaagaggtcgttggatctcccatatcccagcagctttgctcccgtctctgcacctagaaaccagaccttcacttacatgggcaagttctccattgacccacagtaccctggtgccagctgctacccagaaggcataatcaatattgtgagtgcaggcatcttgcaaggggtcacttccccagcttcaaccacagcctcatccagcgtcacctctgcctcccccaacccactggccacaggacccctgggtgtgtgcaccatgtcccagacccagcctgacctggaccacctgtactctccgccaccgcctcctcctccttattctggctgtgcaggagacctctaccaggacccttctgcgttcctgtcagcagccaccacctccacctcttcctctctggcctacccaccacctccttcctatccatcccccaagccagccacggacccaggtctcttcccaatgatcccagactatcctggattctttccatctcagtgccagagagacctacatggtacagctggcccagaccgtaagccctttccctgcccactggacaccctgcgggtgccccctccactcactccactctctacaatccgtaactttaccctggggggccccagtgctgggatgaccggaccaggggccagtggaggcagcgagggaccccggctgcctggtagcagctcagcagcagcagcagccgccgccgccgccgcctataacccacaccacctgccactgcggcccattctgaggcctcgcaagtaccccaacagacccagcaagacgccggtgcacgagaggccctacccgtgcccagcagaaggctgcgaccggcggttctcccgctctgacgagctgacacggcacatccgaatccacactgggcataagcccttccagtgtcggatctgcatgcgcaacttcagccgcagtgaccacctcaccacccatatccgcacccacaccggtgagaagcccttcgcctgtgactactgtggccgaaagtttgcccggagtgatgagaggaagcgccacaccaagatccacctgagacagaaagagcggaaaagcagtgccccctctgcatcggtgccagccccctctacagcctcctgctctgggggcgtgcaggcctgggggtaccctgtgcagcagtaacagcagcagtcttggcggagggccgctcgccccttgctcctctcggacccggacaccttgagatgagactcaggctgatacaccagctcccaaaggtcccggaggccctttgtccactggagctgcacaacaaacactaccaccctttcctgtccctctctccctttgttgggcaaagggctttggtggagctagcactgccccctttccacctagaagcaggttcttcctaaaacttagcccattctagtctctcttaggtgagttgactatcaacccaaggcaaaggggaggctcagaaggaggtggtgtggggatcccctggccaagagggctgaggtctgaccctgctttaaagggttgtttgactaggttttgctaccccacttccccttattttgacccatcacaggtttttgaccctggatgtcagagttgatctaagacgttttctacaataggttgggagatgctgatcccttcaagtggggacagcaaaaagacaagcaaaactgatgtgcactttatggcttgggactgatttgggggacattgtacagtgagtgaagtatagcctttatgccacactctgtggccctaaaatggtgaatcagagcatatctagttgtctcaacccttgaagcaatatgtattatatactcagagaacagaagtgcaatgtgatgggaggaacgtagcaatatctgctccttttcgagttgtttgagaaatgtaggctattttttcagtgtatatccactcagattttgtgtatttttgatgtacccacactgttctctaaattctgaatctttgggaaaaaatgtaaagcatttatgatctcagaggttaacttatttaagggggatgtacatattctctgaaactaggatgcatgcaattgtgttggaagtgtccttggtcgccttgtgtgatgtagacaaatgttacaaggctgcatgtaaatgggttgccttattatggagaaaaaaatcactccctgagtttagtatggctgtatatttatgcctattaatatttggaattttttttagaaagtatatttttgtatgctttgttttgtgacttaaaagtgttacctttgtagtcaaatttcagataagaatgtacataatgttaccggagctgatttgtttggtcattagctcttaatagttgtgaaaaaataaatctattctaacgcaaaaccactaactgaagttcagatataatggatggtttgtgactatagtgtaaataaatacttttcaacaat

SEQ ID NO: 1004 - DNA, 3622 bp, Homo sapiens
  Genbank Accession No. J04111
cccggggaggggaccggggaacagagggccgagaggcgtgcggcaggggggagggtaggagaaagaagggcccgactgtaggagggcagcggagcattacctcatcccgtgagcctccgcgggcccagagaagaatcttctagggtggagtctccatggtgacgggcgggcccgcccccctgagagcgacgcgagccaatgggaaggccttggggtgacatcatgggctatttttaggggttgactggtagcagataagtgttgagctcgggctggataagggctcagagttgcactgagtgtggctgaagcagcgaggcgggagtggaggtgcgcggagtcaggcagacagacagacacagccagccagccaggtcggcagtatagtccgaactgcaaatcttattttcttttcaccttctctctaactgcccagagctagcgcctgtggctcccgggctggtggttcgggagtgtccagagagccttgtctccagccggccccgggaggagagccctgctgcccaggcgctgttgacagcggcggaaagcagcggtaccccacgcgcccgccgggggacgtcggcgagcggctgcagcagcaaagaactttcccggcggggaggaccggagacaagtggcagagtcccggagcgaacttttgcaagcctttcctgcgtcttaggcttctccacggcggtaaagaccagaaggcggcggagagccacgcaagagaagaaggacgtgcgctcagcttcgctcgcaccggttgttgaacttgggcgagcgcgagccgcggctgccgggcgccccctccccctagcagcggaggaggggacaagtcgtcggagtccgggcggccaagacccgccgccggccggccactgcagggtccgcactgatccgctccgcggggagagccgctgctctgggaagtgagttcgcctgcggactccgaggaaccgctgcgcccgaagagcgctcagtgagtgaccgcgacttttcaaagccgggtagcgcgcgcgagtcgacaagtaagagtgcgggaggcatcttaattaaccctgcgctccctggagcgagctggtgaggagggcgcagcggggacgacagccagcgggtgcgtgcgctcttagagaaactttccctgtcaaaggctccggggggcgcgggtgtcccccgcttgccagagccctgttgcggccccgaaacttgtgcgcgcacgccaaactaacctcacgtgaagtgacggactgttctatgactgcaaagatggaaacgaccttctatgacgatgccctcaacgcctcgttcctcccgtccgagagcggaccttatggctacagtaaccccaagatcctgaaacagagcatgaccctgaacctggccgacccagtggggagcctgaagccgcacctccgcgccaagaactcggacctcctcacctcgcccgacgtggggctgctcaagctggcgtcgcccgagctggagcgcctgataatccagtccagcaacgggcacatcaccaccacgccgacccccacccagttcctgtgccccaagaacgtgacagatgagcaggaggggttcgccgagggcttcgtgcgcgccctggccgaactgcacagccagaacacgctgcccagcgtcacgtcggcggcgcagccggtcaacggggcaggcatggtggctcccgcggtagcctcggtggcagggggcagcggcagcggcggcttcagcgccagcctgcacagcgagccgccggtctacgcaaacctcagcaacttcaacccaggcgcgctgagcagcggcggcggggcgccctcctacggcgcggccggcctggcctttcccgcgcaaccccagcagcagcagcagccgccgcaccacctgccccagcagatgcccgtgcagcacccgcggctgcaggccctgaaggaggagcctcagacagtgcccgagatgcccggcgagacaccgcccctgtcccccatcgacatggagtcccaggagcggatcaaggcggagaggaagcgcatgaggaaccgcatcgctgcctccaagtgccgaaaaaggaagctggagagaatcgcccggctggaggaaaaagtgaaaaccttgaaagctcagaactcggagctggcgtccacggccaacatgctcagggaacaggtggcacagcttaaacagaaagtcatgaaccacgttaacagtgggtgccaactcatgctaacgcagcagttgcaaacattttgaagagagaccgtcgggggctgaggggcaacgaagaaaaaaaataacacagagagacagacttgagaacttgacaagttgcgacggagagaaaaaagaagtgtccgagaactaaagccaagggtatccaagttggactgggttcggtctgacggcgcccccagtgtgcacgagtgggaaggacttggtcgcgccctcccttggcgtggagccagggagcggccgcctgcgggctgccccgctttgcggacgggctgtccccgcgcgaacggaacgttggactttcgttaacattgaccaagaactgcatggacctaacattcgatctcattcagtattaaaggggggagggggagggggttacaaactgcaatagagactgtagattgcttctgtagtactccttaagaacacaaagcggggggagggttggggaggggcggcaggagggaggtttgtgagagcgaggctgagcctacagatgaactctttctggcctgctttcgttaactgtgtatgtacatatatatattttttaatttgattaaagctgattactgtcaataaacagcttcatgcctttgtaagttatttcttgtttgtttgtttgggtatcctgcccagtgttgtttgtaaataagagatttggagcactctgagtttaccatttgtaataaagtatataatttttttatgttttgtttctgaaaattccagaaaggatatttaagaaaatacaataaactattggaaagtactcccctaacctcttttctgcatcatctgtagatcctagtctatctaggtggagttgaaagagttaagaatgctcgataaaatcactctcagtgcttcttactattaagcagtaaaaactgttctctattagacttagaaataaatgtacctgatgtacctgatgctatgtcaggcttcatactccacgctcccccagcgtatctatatggaattgcttaccaaaggctagtgcgatgtttcaggaggctggaggaaggggggttgcagtggagagggacagcccactgagaagtcaaacatttcaaagtttggattgcatcaagtggcatgtgctgtgaccatttataatgttagaaattttacaataggtgcttattctcaaagcaggaattggtggcagattttacaaaagatgtatccttccaatttggaatcttctctttgacaattcctagataaaaagatggcctttgtcttatgaatatttataacagcattctgtcacaataaatgtattcaaataccaataacagatcttgaattgcttccctttactacttttttgttcccaagttatatactgaagtttttatttttagttgctgaggtt

SEQ ID NO: 1005 - DNA, 1977 bp, Homo sapiens
  Genbank Accession No. J04162
cactccagtgtggcatcatgtggcagctgctcctcccaactgctctgctacttctagtttcagctggcatgcggactgaagatctcccaaaggctgtggtgttcctggagcctcaatggtacagggtgctcgagaaggacagtgtgactctgaagtgccagggagcctactcccctgaggacaattccacacagtggtttcacaatgagaacctcatctcaagccaggcctcgagctacttcattgacgctgccacagtcgacgacagtggagagtacaggtgccagacaaacctctccaccctcagtgacccggtgcagctagaagtccatgtcggctggctgttgctccaggcccctcggtgggtgttcaaggaggaagaccctattcacctgaggtgtcacagctggaagaacactgctctgcataaggtcacatatttacagaatggcaaagacaggaagtattttcatcataattctgacttccacattccaaaagccacactcaaagatagcggctcctacttctgcagggggcttgttgggagtaaaaatgtgtcttcagagactgtgaacatcaccatcactcaaggtttggcagtgtcaaccatctcatcattctctccacctgggtaccaagtctctttctgcttggtgatggtactcctttttgcagtggacacaggactatatttctctgtgaagacaaacatttgaagctcaacaagagactggaaggaccataaacttaaatggagaaaggaccctcaagacaaatgacccccatcccatgggagtaataagagcagtggcagcagcatctctgaacatttctctggatttgcaaccccatcatcctcaggcctctctacaagcagcaggaaacatagaactcagagccagatcctttatccaactctcgatttttccttggtctccagtggaagggaaaagcccatgatcttcaagcagggaagccccagtgagtagctgcattcctagaaattgaagtttcagagctacacaaacactttttctgtcccaaccattccctcacagtaaaacaacaatacaggctagggatggtaatcctttaaacatacaaaaattgctcgtattataaattacccagtttagaggggaaaaaagaaaataattattcctaaacaaatggataagtagaattaatgattgaggcaggaccctacagagtgtgggaactgctggggatctagagaattcagtgggaccaatgaaagcatggctgagaaatagcagggtagtccaggatagtctaagggaggtgttcccatctgagcccagagataagggtgtcttcctagaacattagccgtagtggaattaacaggaaatcatgagggtgacgtagaattgagtcttccaggggactctatcagaactggaccatttccaagtatataacgatgagccctctaatgctaggagtagcaaatggtcctaggaaggggactgaggattggggtgggggtggggtggaaaagaaagtacagaacaaaccctgtgtcactgtcccaagttaagctaagtgaacagaactatctcagcatcagaatgagaatgagaaagcctgagaagaaagaaccaaccacaagcacacaggaaggaaagcgcaggaggtgaaaatgctttcttggccagggtagtaagaattagaggttaatgcagggactgtaaaaccaccttttctgcttcaatgtctagttcctgtatagctttgttcattgcatttattaaacaaatgttgtataaccaatactaaatgtactactgagcttcactgagttacgctgtgaaactttcaaatccttcttcagtcagttccaatgaggtggggatggagaagacaattgttgcttatgaaaaaaagctttagctgtctcctgttttgtaagctttcagtgcaacatttcttggttccaataaagcattttac

SEQ ID NO: 1006 - DNA, 6158 bp, Homo sapiens
  Genbank Accession No. J04177
  misc_feature (1)..(6158): n = a or c or g or t
aaccatcaaatttagaagaaaaagccctttgactttttccccctctccctccccaatggctgtgtagcaaacatccctggcgataccttggaaaggacgaagttggtctgcagtcgcaatttcgtgggttgagttcacagttgtgagtgcggggctcggagatggagccgtggtcctctaggtggaaaacgaaacggtggctctgggatttcaccgtaacaaccctcgcattgaccttcctcttccaagctagagaggtcagaggagctgctccagttgatgtactaaaagcactagattttcacaattctccagagggaatatcaaaaacaacgggattttgcacaaacagaaagaattctaaaggctcagatactgcttacagagtttcaaagcaagcacaactcagtgccccaacaaaacagttatttccaggtggaactttcccagaagacttttcaatactatttacagtaaaaccaaaaaaaggaattcagtctttccttttatctatatataatgagcatggtattcagcaaattggtgttgaggttgggagatcacctgtttttctgtttgaagaccacactggaaaacctgccccagaagactatcccctcttcagaactgttaacatcgctgacgggaagtggcatcgggtagcaatcagcgtggagaagaaaactgtgacaatgattgttgattgtaagaagaaaaccacgaaaccacttgatagaagtgagagagcaattgttgataccaatggaatcacggtttttggaacaaggattttggatgaagaagtttttgagggggacattcagcagtttttgatcacaggtgatcccaaggcagcatatgactactgtgagcattatagtccagactgtgactcttcagcacccaaggctgctcaagctcaggaacctcagatagatgagtatgcaccagaggatataatcgaatatgactatgagtatggggaagcagagtataaagaggctgaaagtgtaacagagggacccactgtaactgaggagacaatagcacagacggaggcaaacatcgttgatgattttcaagaatacaactatggaacaatggaaagttaccagacagaagctcctaggcatgtttctgggacaaatgagccaaatccagttgaagaaatatttactgaagaatatctaacgggagaggattatgattcccagaggaaaaattctgaggatacactatatgaaaacaaagaaatagacggcagggattctgatcttctggtagatggagatttaggcgaatatgatttttatgaatataaagaatatgaagataaaccaacaagcccccctaatgaagaatttggtccaggtgtaccagcagaaactgatattacagaaacaagcataaatggccatggtgcatatggagagaaaggacagaaaggagaaccagcagtggttgagcctggtatgcttgtcgaaggaccaccaggaccagcaggacctgcaggtattatgggtcctccaggtctacaaggccccactggaccccctggtgaccctggcgataggggccccccaggacgtcctggcttaccaggggctgatggtctacctggtcctcctggtactatgttgatgttaccgttccgttatggtggtgatggttccaaaggaccaaccatctctgctcaggaagctcaggctcaagctattcttcagcaggctcggattgctctgagaggcccacctggcccaatgggtctaactggaagaccaggtcctgtgggggggcctggttcatctggggccaaaggtgagagtggtgatccaggtcctcagggccctcgaggcgtccagggtccccctggtccaacgggaaaacctggaaaaaggggtcgtccaggtgcagatggaggaagaggaatgccaggagaacctggggcaaagggagatcgagggtttgatggacttccgggtctgccaggtgacaaaggtcacaggggtgaacgaggtcctcaaggtcctccaggtcctcctggtgatgatggaatgaggggagaagatggagaaattggaccaagaggtcttccaggtgaagctggcccacgaggtttgctgggtccaaggggaactccaggagctccagggcagcctggtatggcaggtgtagatggccccccaggaccaaaagggaacatgggtccccaaggggagcctgggcctccaggtcaacaagggaatccaggacctcagggtcttcctggtccacaaggtccaattggtcctcctggtgaaaaaggaccacaaggaaaaccaggacttgctggacttcctggtgctgatgggcctcctggtcatcctgggaaagaaggccagtctggagaaaagggggctctgggtccccctggtccacaaggtcctattggatnnccgggcccccggggagtaaagggagcagatggtgtcagaggtctcaagggatctaaaggtgaaaagggtgaagatggttttccaggattcaaaggtgacatgggtctaaaaggtgacagaggagaagttggtcaaattggcccaagagggnaagatggccctgaaggacccaaaggtcgagcaggcccaactggagacccaggtccttcaggtcaagcaggagaaaagggaaaacttggagttccaggattaccaggatatccaggaagacaaggtccaaagggttccactggattccctgggtttccaggtgccaatggagagaaaggtgcacggggagtagctggcaaaccaggccctcggggtcagcgtggtccaacgggtcctcgaggttcaagaggtgcaagaggtcccactgggaaacctgggccaaagggcacttcaggtggcgatggccctcctggccctccaggtgaaagaggtcctcaaggacctcagggtccagttggattccctggaccaaaaggccctcctggaccaccaggaaggatgggctgcccaggacaccctgggcaacgtggggagactggatttcaaggcaagaccggccctcctgggccagggggagtggttggaccacagggaccaaccggtgagactggtccaataggggaacgtgggtatcctggtcctcctggccctcctggtgagcaaggtcttcctggtgctgcaggaaaagaaggtgcaaagggtgatccaggtcctcaaggtatctcagggaaagatggaccagcaggattacgtggtttcccaggggaaagaggtcttcctggagctcagggtgcacctggactgaaaggaggggaaggtccccagggcccaccaggtccagttggctcaccaggagaacgtgggtcagcaggtacagctggcccaattggtttacgagggcgcccgggacctcagggtcctcctggtccagctggagagaaaggtgctcctggagaaaaaggtccccaagggcctgcagggagagatggagttcaaggtcctgttggtctcccagggccagctggtcctgccggctcccctggggaagacggagacaagggtgaaattggtgagccgggacaaaaaggcagcaagggtggcaagggagaaaatggccctcccggtcccccaggtcttcaaggaccagttggtgcccctggaattgctggaggtgatggtgaaccaggtcctagaggacagcaggggatgtttgggcaaaaaggtgatgagggtgccagaggcttccctggacctcctggtccaataggtcttcagggtctgccaggcccacctggtgaaaaaggtgaaaatggggatgttggtccatgggggccacctggtcctccaggcccaagaggccctcaaggtcccaatggagctgatggaccacaaggacccccaggttctgttggttcagttggtggtgttggagaaaagggtgaacctggagaagcaggaaacccagggcctcctggggaagcaggtgtaggcggtcccaaaggagaaagaggagagaaaggggaagctggtccacctggagctgctggacctccaggtgccaaggggccgccaggtgatgatggccctaagggtaacccgggtcctgttggttttcctggagatcctggtcctcctggggaacttggccctgcaggtcaagatggtgttggtggtgacaagggtgaagatggagatcctggtcaaccgggtcctcctggcccatctggtgaggctggcccaccaggtcctcctggaaaacgaggtcctcctggagctgcaggtgcagagggaagacaaggtgaaaaaggtgctaagggggaagcaggtgcagaaggtcctcctggaaaaaccggcccagtcggtcctcagggacctgcaggaaagcctggtccagaaggtcttcggggcatccctggtcctgtgggagaacaaggtctccctggagctgcaggccaagatggaccacctggtcctatgggacctcctggcttacctggtctcaaaggtgaccctggctccaagggtgaaaagggacatcctggtttaattggcctgattggtcctccaggagaacaaggggaaaaaggtgaccgagggctccctggaactcaaggatctccaggagcaaaaggggatgggggaattcctggtcctgctggtcccttaggtccacctggtcctccaggcttaccaggtcctcaaggcccaaagggtaacaaaggctctactggacccgctggccagaaaggtgacagtggtcttccagggcctcctgggcctccaggtccacctggtgaagtcattcagcctttaccaatcttgtcctccaaaaaaacgagaagacatactgaaggcatgcaagcagatgcagatgataatattcttgattactcggatggaatggaagaaatatttggttccctcaattccctgaaacaagacatcgagcatatgaaatttccaatgggtactcagaccaatccagcccgaacttgtaaagacctgcaactcagccatcctgacttcccagatggtgaatattggattgatcctaaccaaggttgctcaggagattccttcaaagtttactgtaatttcacatctggtggtgagacttgcatttatccagacaaaaaatctgagggagtaagaatttcatcatggccaaaggagaaaccaggaagttggtttagtgaatttaagaggggaaaactgctttcatacttagatgttgaaggaaattccatcaatatggtgcaaatgacattcctgaaacttctgactgcctctgctcggcaaaatttcacctaccactgtcatcagtcagcagcctggtatgatgtgtcatcaggaagttatgacaaagcacttcgcttcctgggatcaaatgatgaggagatgtcctatgacaataatccttttatcaaaacactgtatgatggttgtacgtccagaaaaggctatgaaaaaactgtcattgaaatcaatacaccaaaaattgatcaagtacctattgttgatgtcatgatcagtgactttggtgatcagaatcagaagttcggatttgaagttggtcctgtttgttttcttggctaagattaagacaaagaacatatcaaatcaacagaaaatgtaccttggtgccaccaacccattttgtgccacatgcaagttttgaataaggatgtatggaaaacaacgctgcatatacaggtaccatttaggaaataccgatgcctttgtgggggcagaatcacagacaaaagctttgaaaatcataaagatataagttggtgtggctaagatggaaacagggctgattcttgattcccaattctcaactctccttttcctatttgaatttctttggtgctgtagaaaacaaaaaaagaaaaatatatattcataaaaaatatggtgctcattctcatccatccaggatgtactaaaacagtgtgtttaataaattgtaattattttgtgtacagttctatactgttatctgtgtccatttccaaaacttgcacgtgtccctgaattccgctgactctaatttatgaggatgccgaactctgatggcaataatatatgtattatgaaaatgaagttatgatttccgatgaccctaagtccctttctttggttaatgatgaaattcctttgtgtgtgttt

SEQ ID NO: 1007 - DNA, 1447 bp, Homo sapiens
  Genbank Accession No. J04765
gaggcagcagcagcaggaggaggcagacacagcatcgtcgggaccagactcgtctcaggccagttgcagccttctcagccaaacgccgaccaaggaaaactcactaccatgagaattgcagtgatttgcttttgcctcctaggcatcacctgtgccataccagttaaacaggctgattctggaagttctgaggaaaagcagctttacaacaaatacccagatgctgtggccacatggctaaaccctgacccatctcagaagcagaatctcctagccccacagacccttccaagtaagtccaacgaaagccatgaccacatggatgatatggatgatgaagatgatgatgaccatgtggacagccaggactccattgactcgaacgactctgatgatgtagatgacactgatgattctcaccagtctgatgagtctcaccattctgatgaatctgatgaactggtcactgattttcccacggacctgccagcaaccgaagttttcactccagttgtccccacagtagacacatatgatggccgaggtgatagtgtggtttatggactgaggtcaaaatctaagaagtttcgcagacctgacatccagtaccctgatgctacagacgaggacatcacctcacacatggaaagcgaggagttgaatggtgcatacaaggccatccccgttgcccaggacctgaacgcgccttctgattgggacagccgtgggaaggacagttatgaaacgagtcagctggatgaccagagtgctgaaacccacagccacaagcagtccagattatataagcggaaagccaatgatgagagcaatgagcattccgatgtgattgatagtcaggaactttccaaagtcagccgtgaattccacagccatgaatttcacagccatgaagatatgctggttgtagaccccaaaagtaaggaagaagataaacacctgaaatttcgtatttctcatgaattagatagtgcatcttctgaggtcaattaaaaggagaaaaaatacaatttctcactttgcatttagtcaaaagaaaaaatgctttatagcaaaatgaaagagaacatgaaatgcttctttctcagtttattggttgaatgtgtatctatttgagtctggaaataactaatgtgtttgataattagtttagtttgtggcttcatggaaactccctgtaaactaaaagcttcagggttatgtctatgttcattctatagaagaaatgcaaactatcactgtattttaatatttgttattctctcatgaatagaaatttatgtagaagcaaacaaaatacttttacccacttaaaaagagaatataacattttatgtcactataatcttttgttttttaagttagtgtatattttgttgtgattatctttttgtggtgtgaataaatcttttatcttgaatgtaataag

SEQ ID NO: 1008 - DNA, 2334 bp, Homo sapiens
  Genbank Accession No. J05070
agacacctctgccctcaccatgagcctctggcagcccctggtcctggtgctcctggtgctgggctgctgctttgctgcccccagacagcgccagtccacccttgtgctcttccctggagacctgagaaccaatctcaccgacaggcagctggcagaggaatacctgtaccgctatggttacactcgggtggcagagatgcgtggagagtcgaaatctctggggcctgcgctgctgcttctccagaagcaactgtccctgcccgagaccggtgagctggatagcgccacgctgaaggccatgcgaaccccacggtgcggggtcccagacctgggcagattccaaacctttgagggcgacctcaagtggcaccaccacaacatcacctattggatccaaaactactcggaagacttgccgcgggcggtgattgacgacgcctttgcccgcgccttcgcactgtggagcgcggtgacgccgctcaccttcactcgcgtgtacagccgggacgcagacatcgtcatccagtttggtgtcgcggagcacggagacgggtatcccttcgacgggaaggacgggctcctggcacacgcctttcctcctggccccggcattcagggagacgcccatttcgacgatgacgagttgtggtccctgggcaagggcgtcgtggttccaactcggtttggaaacgcagatggcgcggcctgccacttccccttcatcttcgagggccgctcctactctgcctgcaccaccgacggtcgctccgacggcttgccctggtgcagtaccacggccaactacgacaccgacgaccggtttggcttctgccccagcgagagactctacacccgggacggcaatgctgatgggaaaccctgccagtttccattcatcttccaaggccaatcctactccgcctgcaccacggacggtcgctccgacggctaccgctggtgcgccaccaccgccaactacgaccgggacaagctcttcggcttctgcccgacccgagctgactcgacggtgatggggggcaactcggcgggggagctgtgcgtcttccccttcactttcctgggtaaggagtactcgacctgtaccagcgagggccgcggagatgggcgcctctggtgcgctaccacctcgaactttgacagcgacaagaagtggggcttctgcccggaccaaggatacagtttgttcctcgtggcggcgcatgagttcggccacgcgctgggcttagatcattcctcagtgccggaggcgctcatgtaccctatgtaccgcttcactgaggggccccccttgcataaggacgacgtgaatggcatccggcacctctatggtcctcgccctgaacctgagccacggcctccaaccaccaccacaccgcagcccacggctcccccgacggtctgccccaccggaccccccactgtccacccctcagagcgccccacagctggccccacaggtcccccctcagctggccccacaggtccccccactgctggcccttctacggccactactgtgcctttgagtccggtggacgatgcctgcaacgtgaacatcttcgacgccatcgcggagattgggaaccagctgtatttgttcaaggatgggaagtactggcgattctctgagggcagggggagccggccgcagggccccttccttatcgccgacaagtggcccgcgctgccccgcaagctggactcggtctttgaggagccgctctccaagaagcttttcttcttctctgggcgccaggtgtgggtgtacacaggcgcgtcggtgctgggcccgaggcgtctggacaagctgggcctgggagccgacgtggcccaggtgaccggggccctccggagtggcagggggaagatgctgctgttcagcgggcggcgcctctggaggttcgacgtgaaggcgcagatggtggatccccggagcgccagcgaggtggaccggatgttccccggggtgcctttggacacgcacgacgtcttccagtaccgagagaaagcctatttctgccaggaccgcttctactggcgcgtgagttcccggagtgagttgaaccaggtggaccaagtgggctacgtgacctatgacatcctgcagtgccctgaggactagggctcccgtcctgctttgcagtgccatgtaaatccccactgggaccaaccctggggaaggagccagtttgccggatacaaactggtattctgttctggaggaaagggaggagtggaggtgggctgggccctctcttctcacctttgttttttgttggagtgtttctaataaacttggattctctaaccttt

SEQ ID NO: 1009 - DNA, 6210 bp, Homo sapiens
  Genbank Accession No. K00650
gcaggaacagtgctagtattgctcgagcccgagggctggaggttaggggatgaaggtctgcttccacgctttgcactgaattagggctagaattggggatgggggtaggggcgcattccttcgggagccgaggcttaagtcctcggggtcctgtactcgatgccgtttctcctatctctgagcctcagaactgtcttcagtttccgtacaagggtaaaaaggcgctctctgccccatcccccccgacctcgggaacaagggtccgcattgaaccaggtgcgaatgttctctctcattctgcgccgttcccgcctcccctcccccagccgcggcccccgcctccccccgcactgcaccctcggtgttggctgcagcccgcgagcagttcccgtcaatccctccccccttacacaggatgtccatattaggacatctgcgtcagcaggtttccacggcctttccctgtagccctggggggagccatccccgaaacccctcatcttggggggcccacgagacctctgagacaggaactgcgaaatgctcacgagattaggacacgcgccaaggcgggggcagggagctgcgagcgctggggacgcagccgggcggccgcagaagcgcccaggcccgcgcgccacccctctggcgccaccgtggttgagcccgtgacgtttacactcattcataaaacgcttgttataaaagcagtggctgcggcgcctcgtactccaaccgcatctgcagcgagcaactgagaagccaagactgagccggcggccgcggcgcagcgaacgagcagtgaccgtgctcctacccagctctgcttcacagcgcccacctgtctccgcccctcggcccctcgcccggctttgcctaaccgccacgatgatgttctcgggcttcaacgcagactacgaggcgtcatcctcccgctgcagcagcgcgtccccggccggggatagcctctcttactaccactcacccgcagactccttctccagcatgggctcgcctgtcaacgcgcaggtaaggctggcttcccgtcgccgcggggccgggggcttggggtcgcggaggaggagacaccgggcgggacgctccagtagatgagtagggggctcccttgtgcctggagggaggctgccgtggccggagcggtgccggctcgggggctcgggacttgctctgagcgcacgcacgcttgccatagtaagaattggttcccccttcgggaggcaggttcgttctgagcaacctctggtctgcactccaggacggatctctgacattagctggagcagacgtgtcccaagcacaaactcgctaactagagcctggcttcttcggggaggtggcagaaagcggcaatcccccctcccccggcagcctggagcacggaggagggatgagggaggagggtgcagcgggcgggtgtgtaaggcagtttcattgataaaaagcgagttcattctggagactccggagcggcgcctgcgtcagcgcagacgtcagggatatttataacaaaccccctttcaagcaagtgatgctgaagggataacgggaacgcagcggcaggatggaagagacaggcactgcgctgcggaatgcctgggaggaaaagggggagacctttcatccaggatgagggacatttaagatgaaatgtccgtggcaggatcgtttctcttcactgctgcatgcggcactgggaactcgccccacctgtgtccggaacctgctcgctcacgtcggctttccccttctgttttgttctaggacttctgcacggacctggccgtctccagtgccaacttcattcccacggtcactgccatctcgaccagtccggacctgcagtggctggtgcagcccgccctcgtctcctctgtggccccatcgcagaccagagcccctcaccctttcggagtccccgccccctccgctggggcttactccagggctggcgttgtgaagaccatgacaggaggccgagcgcagagcattggcaggaggggcaaggtggaacaggtgaggaactctagcgtactcttcctgggaatgtgggggctgggtgggaagcagccccggagatgcaggagcccagtacagaggatgaagccactgatggggctggctgcacatccgtaactgggagccctggctccaagcccattccatcccaactcagactctgagtctcaccctaagaagtactctcatagtttcttccctaagtttcttaccgcatgctttcagactgggctcttctttgttctcttgctgaggatcttattttaaatgcaagtcacacctattctgcaactgcaggtcagaaatggtttcacagtggggtgccaggaagcagggaagctgcaggagccagttctactggggtgggtgaatggaggtgatggcagacacttttactgaatgtcggtctttttttgtgattattctagttatctccagaagaagaagagaaaaggagaatccgaagggaaaggaataagatggctgcagccaaatgccgcaaccggaggagggagctgactgatacactccaagcggtaggtactctgtgggttgctcctttttaaaacttaagggaaagttggagattgagcataagggcccttgagtaagactgtgtcttatgctttcctttatccctctgtatacaggagacagaccaactagaagatgagaagtctgctttgcagaccgagattgccaacctgctgaaggagaaggaaaaactagagttcatcctggcagctcaccgacctgcctgcaagatccctgatgacctgggcttcccagaagagatgtctgtggcttcccttgatctgactgggggcctgccagaggttgccaccccggagtctgaggaggccttcaccctgcctctcctcaatgaccctgagcccaagccctcagtggaacctgtcaagagcatcagcagcatggagctgaagaccgagccctttgatgacttcctgttcccagcatcatccaggcccagtggctctgagacagcccgctccgtgccagacatggacctatctgggtccttctatgcagcagactgggagcctctgcacagtggctccctggggatggggcccatggccacagagctggagcccctgtgcactccggtggtcacctgtactcccagctgcactgcttacacgtcttccttcgtcttcacctaccccgaggctgactccttccccagctgtgcagctgcccaccgcaagggcagcagcagcaatgagccttcctctgactcgctcagctcacccacgctgctggccctgtgagggggcagggaaggggaggcagccggcacccacaagtgccactgcccgagctggtgcattacagagaggagaaacacatcttccctagagggttcctgtagacctagggaggaccttatctgtgcgtgaaacacaccaggctgtgggcctcaaggacttgaaagcatccatgtgtggactcaagtccttacctcttccggagatgtagcaaaacgcatggagtgtgtattgttcccagtgacacttcagagagctggtagttagtagcatgttgagccaggcctgggtctgtgtctcttttctctttctccttagtcttctcatagcattaactaatctattgggttcattattggaattaacctggtgctggatattttcaaattgtatctagtgcagctgattttaacaataactactgtgttcctggcaatagtgtgttctgattagaaatgaccaatattatactaagaaaagatacgactttattttctggtagatagaaataaatagctatatccatgtactgtagtttttcttcaacatcaatgttcattgtaatgttactgatcatgcattgttgaggtggtctgaatgttctgacattaacagttttccatgaaaacgttttattgtgtttttaatttatttattaagatggattctcagatatttatatttttattttatttttttctaccttgaggtcttttgacatgtggaaagtgaatttgaatgaaaaatttaagcattgtttgcttattgttccaagacattgtcaataaaagcatttaagttgaatgcgaccaaccttgtgctcttttcattctggaagtcttgtaagtttctgaaaggtattattggagaccagtttgtcaagaagggtagctgctggagggggacacaccctctgtctgatcccttatcaaagaggacaaggaaactatagagctgattttagaatattttacaaatacatgccttccattggaatgctaagattttctactgcttctggggacgggaaaccgctgtgtaacagcttttgtgggaatacattttttctgtttcagtactcgcagggggaaatatttaaattttgttgtgctaatattaaattcagatgttttgatcttaaaggaaccctttaagcaaacagaacctagctttgtacagactattttaactttttattctcacaaaatcacgtggagggttattctacttcaaagatgagcaaattgaagaatggttagaataaacaactttcttgatattccgttatcggcattagaatcttcctgctcgttatcgtatccagcaggctgaactgcctcttgatacttggttaaaaaaaattttcaggccgggcgcggtggcccatgcctgtaatcctagcactttgggaggccgaggcaggcggatcacctgaggtcgggagttcgagaccagcctgaccaacatggagaaaccccgtctttactaaaaatacaaaattagcctggtgtggtggtgcatgcctgtaatcctagctacttgagaggctgagacaggaaaatcacttgaactcgggaggcggatgttgcagcgaactgagattgcgccattgcactccagcctgggcaacaagattgaaactctgtttaaaaaaaaaagttttcactaatgtgtacatttttttgtactcttttattctcgaaagggaaggagggctattgccctatcccttattaataaatgcattgtggtttctggtttctctaataccatatgcccttcattcagtttatagtgggcggaagtgggggagaaaaagttgctcagaaatcaaaagatatctcaaacagcacaaataatggctgatcgttctgcaaacaaaaagttacataatagctcaagaaggagaagtcaacatgactctgaacaagctttaacttagaaactttatcatcttaaggaagaacgtgacctttgtccaggacgtctctggtaatggggcacttacacacacatgcacacgtacaaaccacagggaaaggagaccgcccttctgcctctgctcgcgagtatcacgcaggcaccatgcactatgttttcacacacactgggtggaagaagagcttcagcgccagtcttctaatgctttggtgataatgaaaatcactgggtgcttatggggtgtcatattcaatcgagttaaaagttttaattcaaaatgacagttttactgaggttgatgttctcgtctatgatatctctgcccctcccataaaaatggacatttaaaagcaacttaccgctctttagatcactcctatatcacacaccacttggggtgctgtttctgctagacttgtgatgacagtggccttaggatccctgtttgctgttcaaagggcaaatattttatagcctttaaatatacctaaactaaatacagaattaatataactaacaaacacctggtctgaaataacaaggtgatctaccctggaaggaacccagctggtgggccaggagcggtggctcacacctgtaattccagcactttgggaggctgagacaggaggatcactggagtccaggagtttgagaccagcctgggcaacatggcaaaacccagtgtgcttctgttgtcccagctacactactcaggaggctgaggcaggagtatgacttgagcctgggagggggaggttgcagagaactgatattgcaccaccactgcactccagcctgggtgacacagcaaaaccctatctcaaaaaaaaaaaaaaaaaaaaggaacccagctggttcctgtaggtgtgcaataataacaaccagaggaagaaaaggaagacgatttcccagatgaagaagggcagctggaccttcggac

SEQ ID NO: 1010 - DNA, 1421 bp, Homo sapiens
  Genbank Accession No. K02581
acttactgcgggacggccttggagagtactcgggttcgtgaacttcccggaggcgcaatgagctgcattaacctgcccactgtgctgcccggctcccccagcaagacccgggggcagatccaggtgattctcgggccgatgttctcaggaaaaagcacagagttgatgagacgcgtccgtcgcttccagattgctcagtacaagtgcctggtgatcaagtatgccaaagacactcgctacagcagcagcttctgcacacatgaccggaacaccatggaggcgctgcccgcctgcctgctccgagacgtggcccaggaggccctgggcgtggctgtcataggcatcgacgaggggcagtttttccctgacatcatggagttctgcgaggccatggccaacgccgggaagaccgtaattgtggctgcactggatgggaccttccagaggaagccatttggggccatcctgaacctggtgccgctggccgagagcgtggtgaagctgacggcggtgtgcatggagtgcttccgggaagccgcctataccaagaggctcggcacagagaaggaggtcgaggtgattgggggagcagacaagtaccactccgtgtgtcggctctgctacttcaagaaggcctcaggccagcctgccgggccggacaacaaagagaactgcccagtgccaggaaagccaggggaagccgtggctgccaggaagctctttgccccacagcagattctgcaatgcagccctgccaactgagggacctgcaagggccgcccgctcccttcctgccactgccgcctactggacgctgccctgcatgctgcccagccactccaggaggaagtcgggaggcgtggagggtgaccacaccttggccttctgggaactctcctttgtgtggctgccccacctgccgcatgctccctcctctcctacccactggtctgcttaaagcttccctctcagctgctgggacgatcgcccaggctggagctggccccgcttggtggcctgggatctggcacactccctctccttggggtgagggacagagccccacgctgttgacatcagcctgcttcttcccctctgcggctttcactgctgagtttctgttctccctgggaagcctgtgccagcacctttgagccttggcccacactgaggcttaggcctctctgcctgggatgggctcccaccctcccctgaggatggcctggattcacgccctcttgtttccttttgggctcaaagcccttcctacctctggtgatggtttccacaggaacaacagcatctttcaccaagatgggtggcaccaaccttgctgggacttggatcccaggggcttatctcttcaagtgtggagagggcagggtccacgcctctgctgtagcttatgaaattaactaatt

SEQ ID NO: 1011 - DNA, 1560 bp, Homo sapiens
  Genbank Accession No. K03000
atatgtggccaaatcattccttggaatttcccgttggttatgctcatttggaagatagggcctgcactgagctgtggaaacacagtggttgtcaaaccagcagagcaaactcctctcactgctctccacgtggcatctttaataaaagaggcagggtttcctcctggagtagtgaatattgttcctggttatgggcctacagcaggggcagccatttcttctcacatggatatagacaaagtagccttcacaggatcaacagaggttggcaagttgatcaaagaagctgccgggaaaagcaatctgaagagggtgaccctggagcttggaggaaagagcccttgcattgtgttagctgatgccgacttggacaatgctgttgaatttgcacaccatggggtattctaccaccagggccagtgttgtatagccgcatccaggatttttgtggaagaatcaatttatgatgagtttgttcgaaggagtgttgagcgggctaagaagtatatccttggaaatcctctgaccccaggagtcactcaaggccctcagattgacaaggaacaatatgataaaatacttgacctcattgagagtgggaagaaagaaggggccaaactggaatgtggaggaggcccgtgggggaataaaggctactttgtccagcccacagtgttctctaatgttacagatgagatgcgcattgccaaagaggagatttttggaccagtgcagcaaatcatgaagtttaaatctttagatgacgtgatcaaaagagcaaacaatactttctatggcttatcagcaggagtgtttaccaaagacattgataaagccataacaatctcctctgctctgcaggcaggaacagtgtgggtgaattgctatggcgtggtaagtgcccagtgcccctttggtggattcaagatgtctggaaatggaagagaactgggagagtacggtttccatgaatatacagaggtcaaaacagtcacagtgaaaatctctcagaagaactcataaagaaaatacaagagtggagagaagctcttcaatagctaagcatctccttacagtcactaatatagtagattttaaagacaaaatttttcttttcttgattttttttaaacataagctaaatcatattagtattaatactacccatagaaaacttgacatgtagcttcttctgaaagaattatttgccttctgaaatgtgacccccaagtcctatcctaaataaaaaaagacaaattcggatgtatgatctctctagctttgtcatagttatgtgattttcctttgtagctacttttgcaggataataattttatagaaaaggaacagttgcatttagcttctttcccttagtgactcttgaagtacttaacatacacgttaactgcagagtaaattgctctgttcccagtagttataaagtccttggactgttttgaaaagtttcctaggatgtcatgtctgcttgtcaaaagaaataatccctgtaatatttagctgtaaactgaatataaagcttaataaaaacaaccttgcata

SEQ ID NO: 1012 - DNA, 4208 bp, Homo sapiens
  Genbank Accession No. L07594
tctttaagatttgtagctactaagaaagaaaggagctttttttccttgggccttcaaactgaaagaaccgcatgagcctgacggcgcatggtcttaacatcaggctgtgcaggaagaagctatctgcagatggatgccagcacacacaaggaagcagagctctggcaacattgagtcaaagcaaggacacaacatcagagggacggcagagaatccttgtgtgtagtctttggtggcagtttgaaaattgcaaggagggactttaagactacttctgatttgcaaagatggtctgtgctccgagcaggctaaagtgactggacgagacgcactgttggagaaataaaaatgacttcccattatgtgattgccatctttgccctgatgagcttctgtttagccactgcaggtccagagcctggtgcactgtgtgaactgtcacctgtcagtgcctcccatcctgtccaggccttgatggagagcttcactgttttgtcaggctgtgccagcagaggcacaactgggctgccacaggaggtgcatgtcctgaatctcgcactgcgccaggggcctggccagctacagagagaggtcacacttcacctgaatcccatctcctcagtccacatccaccacaagtctgttgtgttcctgctcaactccccacaccccctggtgtggcatctgaagacagagagacttgccactggggtctccagactgtttttggtgtctgagggttctgtggtccagttttcatcagcaaacttctccttgacagcagaaacagaagaaaggaacttcccccatggaaatgaacatctgttaaattgggcccgaaaagagtatggagcagttacttcattcaccgaactcaagatagcaagaaacatttatattaaagtgggggaagatcaagtgttccctccaaagtgcaacatagggaagaattttctctcactcaattaccttgctgagtaccttcaacccaaagcagcagaagggtgtgtgatgtccagccagccccagaatgaggaagtacacatcatcgagctaatcacccccaactctaacccctacagtgctttccaggtggatataacaattgatataagaccttctcaagaggatcttgaagtggtcaaaaatctcatcctgatcttgaagtgcaaaaagtctgtcaactgggtgatcaaatcttttgatgttaagggaagcctgaaaattattgctcctaacagtattggctttggaaaagagagtgaaagatctatgacaatgaccaaatcaataagagatgacattccttcaacccaagggaatctggtgaagtgggctttggacaatggctatagtccaataacttcatacacaatggctcctgtggcaatagtatttcatcttcggcttgaaaataatgaggagatgggagatgaggaagtccacactattcctcctgagctacggatcctgctggaccctggtgccctgcctgccctgcagaacccgcccatccggggaggggaaggccaaaatggaggccttccgtttcctttcccagatatttccaggagagtctggaatgaagagggagaagatgggctccctcggccaaaggaccctgtcattcccagcatacaactgtttcctggtctcagagagccagaagaggtgcaagggagcgtggatattgccctgtctgtcaaatgtgacaatgagaagatgatcgtggctgtagaaaaagattcttttcaggccagtggctactcggggatggacgtcaccctgttggatcctacctgcaaggccaagatgaatggcacacactttgttttggagtctcctctgaatggctgcggtactcggccccggtggtcagcccttgatggtgtggtctactataactccattgtgatacaggttccagcccttggggacagtagtggttggccagatggttatgaagatctggagtcaggtgataatggatttccgggagatatggatgaaggagatgcttccctgttcacccgacctgaaatcgtggtgtttaattgcagccttcagcaggtgaggaaccccagcagcttccaggaacagccccacggaaacatcaccttcaacatggagctatacaacactgacctctttttggtgccctcccagggcgtcttctctgtgccagagaatggacacgtttatgttgaggtatctgttactaaggctgaacaagaactgggatttgccatccaaacgtgctttatctctccatattcgaaccctgataggatgtctcattacaccattattgagaatatttgtcctaaagatgaatctgtgaaattctacagtcccaagagagtgcacttccctatcccgcaagctgacatggataagaagcgattcagctttgtcttcaagcctgtcttcaacacctcactgctctttctacagtgtgagctgacgctgtgtacgaagatggagaagcacccccagaagttgcctaagtgtgtgcctcctgacgaagcctgcacctcgctggacgcctcgataatctgggccatgatgcagaataagaagacgttcaccaagccccttgctgtgatccaccatgaagcagaatctaaagaaaaaggtccaagcatgaaggaaccaaatccaatttctccaccaattttccatggtctggacaccctaaccgtgatgggcattgcgtttgcagcctttgtgatcggagcactcctgacgggggccttgtggtacatctattctcacacaggggagacagcaggaaggcagcaagtccccacctccccgccagcctcggaaaacagcagtgctgcccacagcatcggcagcacgcagagcacgccttgctccagcagcagcacggcctagcccaacccaggcccaacccggcccaacccagcccagcccagctcagctcagctactccaagggcaggaccaatggctgagcctcgtgtccagactcagagggctggattttggttcccttgtaaagacagagtgaatttcagtataaagatcacccgttgtattcaccccacacccagggctagtataaacatgaccctgggcttctgtaccacactagaattcatgtgagaaagctaaaatggtggtcttctccaccagcccctcacaggcttgggggttttctatgtgaaacacatgccagtttttaaaatgctgctttgtccaggtgagaacatccataatttggggccctgagttttacccagactcaaggagttggtaaagggttaatagccagatagtagaaccagtgaggagatgcggccaaagattctttatatctgaaccaagatgtaaaacaagaaatgctttgaggctttctaagcgatcctcctgtctaatttgcacctttgtctggatgcactcttctgaccttgctgccacaacctgtggggtctgatgtgtcccaagatgggtgctgccctcagggactgcaccctgacaagtgttaaggcaacattccttgcttgtgccctgggccaaaaccaatgctgatgaccttatcagcttcctgtttcttcccatactgcatacaccactgcaaaatgtcttaatgcaaattttgtatttcttacaggcctacagaaattgaaaatgaccaaaatcaggaaccacagatttgtgcccattcctaatattttgttctgcaaattaatgtataatttgaggtgaaattcagttataaagtcaaggacgaatttgcacagtgatatatttctatgtgtatgcaagtacaagtatataatatgtcacctggcacattcattttctcagttgaagaagagaaaatttgaaaatgtccttatgcttttagagttgcaacttaagtatatttggtagggtgagtgtttccactcaaaatatgtcaacttaaaaaaaaataggccctttcataaaaaccaaactgtagcaagatgcaaatgcatggcaaatctgtcggtctccagttggttatctgaatagtgtcaccaattccaccaagacagtgctgagattggaaagggcactcatttggattgccttacttctcttgccttaaatatatcccatatatttaatatgtcaaaaagggcttgaggtgaatttcattaaatggaataatatgatgccactttgcagctaaaataagctcagtgatacctccttgtt

SEQ ID NO: 1013 - DNA, 1705 bp, Homo sapiens
  Genbank Accession No. L08488
gaattcatctgtccactgctacccctgctgaggccaagctcggatccggtgccgagccaagcggggccgtgcgtcgccggccttcgctcgcgtgacctccgccgtcctccccaaccctcgtcctctgcgcctgcggccgcagccccagcgcccctcgcctaacctcccgccgggccgcgcctcctcctcctcctgctccccgccgcttccgtttctcgagggaaaggctgctgcctcctgctctgtcctcatccccggcttagctgacggcccagaggtgggtgccaattccaccagcagctgcaactgaaaagcaaggttcagaaatgtcagatatcctccgggagctgctctgtgtctctgagaaggctgctaacattgcccgggcgtgcagacagcaggaagccctcttccagctgctgatcgaagaaaagaaagagggagaaaagaacaagaagtttgcagttgacttcaagactctggctgatgtactggtacaggaagttataaaacagaatatggagaacaagtttccaggcttggaaaaaaatatttttggagaagaatccaatgagtttactaatgactggggggaaaagattaccttgaggttgtgttcaacagaggaagaaacagcagagcttcttagcaaagtcctcaatggtaacaaggtagcatctgaagcattagccagggttgttcatcaggatgttgcctttactgacccaactctggattccacagagatcaatgttccacaggacattttgggaatttgggtggaccccatagattcaacttatcagtatataaaaggttctgctgacattaaatccaaccagggaatcttcccctgtggacttcagtgtgtcaccattttaattggtgtctatgacatacagacaggggttcccctgatgggagtcatcaatcaaccttttgtgtcacgagatccaaacaccctcaggtggaaaggacagtgctattggggcctttcttacatggggaccaacatgcattcactacagctcaccatctctagaagaaacggcagtgaaacacacactggaaacaccggctctgaggcagcattctcccccagtttttcagccgtaattagtacaagtgaaaaggagactatcaaagctgcattgtcacgtgtgtgtggagatcgcatatttggggcagctggggctggttataagagcctatgtgttgtccaaggcctcgttgacatttacatcttttcagaagataccacattcaaatgggactcttgtgctgctcatgccatactgcgggccatgggtgggggaatagtagacttgaaagaatgcttagaaagaaatccagaaacagggcttgatttgccacagttggtgtaccacgtggaaaatgagggtgctgctggggtggatcggtgggccaacaagggaggactcattgcatacagatccaggaagcggctggagacattcctgagcctcctggtccaaaacctggcacctgcagagacgcatacctagaggaactctaaccccggtgtacctgtataaactgaactgtgaaactgtttcggttatctctgtcttttgaggatggctttgtcctgttgctggttaacattcaccttcctcttttgaggagtatttttccattatgtattcataataatgttaatttcaataaatgacattcatgcagc

SEQ ID NO: 1014 - DNA, 1792 bp, Homo sapiens
  Genbank Accession No. L10373
gaattccatatcatggcctgccgccgccgccgccgccgccggagctctgtagtatggcatcgaggagaatggagaccaaacctgtgataacctgtctcaaaaccctcctcatcatctactccttcgtcttctggatcactggggtgatcctgctggctgttggagtctggggcaaacttactctgggcacctatatctcccttattgccgagaactccacaaatgctccctatgtgctcatcggaactggcaccactattgttgtctttggcctgtttggatgctttgctacatgtcgtggtagcccatggatgctgaaactgtatgccatgtttctgtccctggtgttcctggctgagctcgtagctggcatttcagggtttgtgtttcgtcatgagatcaaggacaccttcctgaggacttacacggacgctatgcagacttacaatggcaatgatgagaggagccgggcagtggaccatgtgcagcgcagcctgagctgctgtggtgtgcagaactacaccaactggagcaccagcccctacttcctggagcatggcatcccccccagctgctgcatgaacgaaactgattgtaatccccaggatctacacaatctgactgtggccgccaccaaagttaaccagaagggttgttatgatctggtaactagtttcatggagactaacatgggaatcatcgctggagtggcgtttggaatcgcattctcccagttaattggcatgctgctggcctgctgtctgtcccggttcatcacggccaatcagtatgagatggtgtaaggagaagtctttcaagaatgacggaataagagacctgttttaaaaaggaactgcagcaatctttgaaagacttccaaagaatgttagagcacagtacataatacacttgccctgctccctctaccccttaccccacaacgtgcaactgacactcccacccagtctctgctccacctttcagcccacgtcacgtgtagtgtccattttgtgaagccctgttgtgccacagagtgtagccaggtccccctgcagctagtcctagtgaacctcaccccgaggccctgcatgggccagcccctccatctgtacttggtccaactgcaactcatcatcggtgactggttatcacaccatcgctggcccctttgggccctgcatgtagtgtgggaggctcctgttagctcctcactgtggtaaatgccacacacctttaagtagataagcagacgatagttatctgttcttttgacttaatctcatttggtttgattttccctctactaaggctttcctaccttcttcaggctgcctaagacatgtaacgaaacacttcaataattgtccatgaggagaaaaaaagcatgtgtcatgcatgaaggaaactgaacttgaggtggcctccttgcttgttacatacctgggtatgtgtaggcagtttagtgcatctttgcctctcagttgaaacctgtataaccctgttacaaagctgtgttgttgcttcttgtgaaggccatgatattttgtttttccccaattaattgctattgtgttattttactacttctctctgtattttttcttgcattgacattatagacattgaggacctcatccaaacaatttaaaaatgagtgtgaagggggaacaagtcaaaatatttttaaaagatcttcaaaaataatgcctctgtctagcatgccaacaagaatgcattgatattgtgaacatttgtgatatatgtattaataaatagagcaattacggaattc

SEQ ID NO: 1015 - DNA, 1345 bp, Homo sapiens
  Genbank Accession No. L13463
aaaacagccggggctccagcgggagaacgataatgcaaagtgctatgttcttggctgttcaacacgactgcagacccatggacaagagcgcaggcagtggccacaagagcgaggagaagcgagaaaagatgaaacggacccttttaaaagattggaagacccgtttgagctacttcttacaaaattcctctactcctgggaagcccaaaaccggcaaaaaaagcaaacagcaagctttcatcaagccttctcctgaggaagcacagctgtggtcagaagcatttgacgagctgctagccagcaaatatggtcttgctgcattcagggcttttttaaagtcggaattctgtgaagaaaatattgaattctggctggcctgtgaagacttcaaaaaaaccaaatcaccccaaaagctgtcctcaaaagcaaggaaaatatatactgacttcatagaaaaggaagctccaaaagagataaacatagattttcaaaccaaaactctgattgcccagaatatacaagaagctacaagtggctgctttacaactgcccagaaaagggtatacagcttgatggagaacaactcttatcctcgtttcttggagtcagaattctaccaggacttgtgtaaaaagccacaaatcaccacagagcctcatgctacatgaaatgtaaaagggagcccagaaatggaggacatttcattctttttcctgaggggaaggactgtgacctgccataaagactgaccttgaattcagcctgggtgttcaggaaacatcactcagaactattgattcaaagttgggtagtgaatcaggaagccagtaactgactaggagaagctggtatcagaacagcttccctcactgtgtacagaacgcaagaagggaataggtggtctgaacgtggtgtctcactctgaaaagcaggaatgtaagatgatgaaagagacaatgtaatactgttggtccaaaagcatttaaaatcaatagatctgggattatgtggccttaggtagctggttgtacatctttccctaaatcgatccatgttaccacatagtagttttagtttaggattcagtaacagtgaagtgtttactatgtgcaagggtattgaagttcttatgaccacagatcatcagtactgttgtctcatgtaatgctaaaactgaaatggtccgtgtttgcattgttaaaaatgatgtgtgaaatagaatgagtgctatggtgttgaaaactgcagtgtccgttatgagtgccaaaaatctgtcttgaaggcagctacactttgaagtggtctttgaatacttttaataaatttattttgataaataatattg

SEQ ID NO: 1016 - DNA, 2464 bp, Homo sapiens
  Genbank Accession No. L13740
cggaaacttgggggagtgcacagaagaacttcgggagcgcacgcgggaccagggaccaggctgagactcggggcgccagtccgggcaggggcagcgggacgcggccggagatgccctgtatccaagcccaatatgggacaccagcaccgagtccgggaccccgtgaccacctggcaagcgaccccctgacccctgagttcatcaagcccaccatggacctggccagccccgaggcagcccccgctgcccccactgccctgcccagcttcagcacgttcatggacggctacacaggagagtttgacaccttcctctaccagctgccaggaacagtccagccatgctcctcagcctcctcctcggcctcctccacatcctcgtcctcagccacctcccctgcctctgcctccttcaagttcgaggacttccaggtgtacggctgctaccccggccccctgagcggcccagtggatgaggccctgtcctccagtggctctgactactatggcagcccctgctcggccccgtcgccctccacgcccagcttccagccgccccagctctctccctgggatggctccttcggccacttctcgcccagccagacttacgaaggcctgcgggcatggacagagcagctgcccaaagcctctgggcccccacagcctccagccttcttttccttcagtcctcccactggccccagccccagcctggcccagagccccctgaagttgttcccctcacaggccacccaccagctgggggagggagagagctattccatgcctacggccttcccaggtttggcacccacttctccacaccttgagggctcggggatactggatacacccgtgacctcaaccaaggcccggagcggggccccaggtccaagtgaaggccgctgtgctgtgtgtggggacaacgcttcatgccagcattatggtgtccgcacatgtgagggctgcaagggcttcttcaagcgcacagtgcagaaaaacgccaagtacatctgcctggctaacaaggactgccctgtggacaagaggcggcgaaaccgctgccagttctgccgcttccagaagtgcctggcggtgggcatggtgaaggaagttgtccgaacagacagcctgaaggggcggcggggccggctaccttcaaaacccaagcagcccccagatgcctcccctgccaatctcctcacttccctggtccttgcacacctggattcagggcccagcactgccaaactggactactccaagttccaggagctggtgctgccccactttgggaaggaagatgctggggatgtacagcagttctacgacctgctctccggttctctggaggtcatccgaaagtgggcggagaagatccctggctttgctgagctgtcaccggctgaccaggacctgttgctggagtcggccttcctggagctcttcatcctccgcctggcgtacaggtctaagccaggcgagggcaagctcatcttctgctcaggcctggtgctacaccggctgcagtgtgcccgtggcttcggggactggattgacagtatcctggccttctcaaggtccctgcacagcttgcttgtcgatgtccctgccttcgcctgcctctctgcccttgtcctcatcaccgaccggcatgggctgcaggagccgcggcgggtggaggagctgcagaaccgcatcgccagctgcctgaaggagcacgtggcagctgtggcgggcgagccccagccagccagctgcctgtcacgtctgttgggcaaactgcccgagctgcggaccctgtgcacccagggcctgcagcgcatcttctacctcaagctggaggacttggtgccccctccacccatcattgacaagatcttcatggacacgctgcccttctgacccctgcctgggaacacgtgtgcacatgcgcactctcatatgccaccccatgtgcctttagtccacggacccccagagcacccccaagcctgggcttgagctgcagaatgactccaccttctcacctgctccaggaggtttgcagggagctcaagcccttggggagggggatgccttcatgggggtgaccccacgatttgtcttatcccccccagcctggccccggcctttatgttttttgtaagataaaccgtttttaacacatagcgccgtgctgtaaataagcccagtgctgctgtaaatacaggaagaaagagcttgaggtgggagcggggctgggaggaagggatgggccccgccttcctgggcagcctttccagcctcctgcctggctctctcttcctaccctccttccacatgtacataaactgtcactctaggaagaagacaaatgacagattctgacatttatatttgtgtattttcctggatttatagtatgtgacttttctgattaatatatttaatatattgaataaaaaatagacatgtagttg

SEQ ID NO: 1017 - DNA, 1914 bp, Homo sapiens
  Genbank Accession No. L19871
gcagccaggcgcgcactgcacagctctcttctctcgccgccgcccgagcgcacccttcagcccgcgcgccggccgtgagtcctcggtgctcgcccgccggccagacaaacagcccgcccgaccccgtcccgaccctggccgccccgagcggagcctggagcaaaatgatgcttcaacacccaggccaggtctctgcctcggaagtgagtgcttctgccatcgtcccctgcctgtcccctcctgggtcactggtgtttgaggattttgctaacctgacgccctttgtcaaggaagagctgaggtttgccatccagaacaagcacctctgccaccggatgtcctctgcgctggaatcagtcactgtcagcgacagacccctcggggtgtccatcacaaaagccgaggtagcccctgaagaagatgaaaggaaaaagaggcgacgagaaagaaataagattgcagctgcaaagtgccgaaacaagaagaaggagaagacggagtgcctgcagaaagagtcggagaagctggaaagtgtgaatgctgaactgaaggctcagattgaggagctcaagaacgagaagcagcatttgatatacatgctcaaccttcatcggcccacgtgtattgtccgggctcagaatgggaggactccagaagatgagagaaacctctttatccaacagataaaagaaggaacattgcagagctaagcagtcgtggtatgggggcgactggggagtcctcattgaatcctcattttatacccaaaaccctgaagccattggagagctgtcttcctgtgtacctctagaatcccagcagcagagaaccatcaaggcgggagggcctgcagtgattcagcaggcccttcccattctgccccagagtgggtcttggaccagggcaagtgcatctttgcctcaactccaggatttaggccttaacacactggccattcttatgttccagatggcccccagctggtgtcctgcccgcctttcatctggattctacaaaaaaccaggatgcccaccgttagattcaggcagcagtgtctgtacctcgggtgggagggatggggccatctccttcaccgtggctaccattgtcactcgtaggggatgtggagtgagaacagcatttagtgaagttgtgcaacggccagggttgtgctttctagcaaatatgctgttatgtccagaaattgtgtgtgcaagaaaactaggcaatgtactcttccgatgtttgtgtcacacaacactgatgtgacttttatatgctttttctcagatctggtttctaagagttttggggggcggggctgtcaccacgtgcagtatctcaagatattcaggtggccagaagagcttgtcagcaagaggaggaacagaattctcccagcgttaacacaaaatccatgggcagcatgatggcaggtcctctgttgcaaactcagttccaaagtcacaggaagaaagcagaaagttcaacttccaaagggttaggactctccactcaatgtcttaggtcaggagttgtgtctaggctggaagagccaaagaaatattccattttcctttccttgtggttgaaaccacagtcagtggagagatgtttggaacacagtcagtggagctggtggtaccaggtttagcattattggatgtcaaaagcattttttttgtcatgtagctgttttaagaaatctggcccagggtgtttgcagctgtgagaagtcactcacactggccacaaggacgctggctactgtctattaaaattctgatgtttctgtgaaattctcagagtgtttaattgtactcaatggtatcattacaattttctgtaagagaaaatattacttatttatcctagtattcctaacctgtcagaataataaatattgtggtaaaa

SEQ ID NO: 1018 - DNA, 309 bp, Homo sapiens
  Genbank Accession No. L22524
ctctcaataggaaagagaagtaattcaagaaagaaatagaaacttcaggcagaacatccattcattcattcattggattgtatatcattgttgcacaatcagaattgataagcactgttcttccactccatttagcaattatgtcacccttttttattgcagttggtttttgaatgtctttcactccttttaaggataaactcctttatggtgtgactgtgtcttattcatctatacttgcagtgggtagatgtcaataaatgttacatacacaaataaataaaatgtttattccatggtaaatttatt

SEQ ID NO: 1019 - DNA, 3018 bp, Homo sapiens
  Genbank Accession No. L24203
ctcctcacaggtgtgtctctagtcctcgtggttgcctgccccactccctgccgagacgcctgccagaaaggtcacctatcctgaaccccagcaagcctgaaacagctcagccaagcaccctgcgatggaagctgcagatgcctccaggagcaacgggtcgagcccagaagccagggatgcccggagcccgtcgggccccagtggcagcctggagaatggcaccaaggctgacggcaaggatgccaagaccaccaacgggcacggcggggaggcagctgagggcaagagcctgggcagcgccctgaagccaggggaaggtaggagcgccctgttcgcgggcaatgagtggcggcgacccatcatccagtttgtcgagtccggggacgacaagaactccaactacttcagcatggactctatggaaggcaagaggtcgccgtacgcagggctccagctgggggctgccaagaagccacccgttacctttgccgaaaagggcgacgtgcgcaagtccattttctcggagtcccggaagcccacggtgtccatcatggagcccggggagacccggcggaacagctacccccgggccgacacgggccttttttcacggtccaagtccggctccgaggaggtgctgtgcgactcctgcatcggcaacaagcagaaggcggtcaagtcctgcctggtgtgccaggcctccttctgcgagctgcatctcaagccccacctggagggcgccgccttccgagaccaccagctgctcgagcccatccgggactttgaggcccgcaagtgtcccgtgcatggcaagacgatggagctcttctgccagaccgaccagacctgcatctgctacctttgcatgttccaggagcacaagaatcatagcaccgtgacagtggaggaggccaaggccgagaaggagacggagctgtcactgcaaaaggagcagctgcagctcaagatcattgagattgaggatgaagctgagaagtggcagaaggagaaggaccgcatcaagagcttcaccaccaatgagaaggccatcctggagcagaacttccgggacctggtgcgggacctggagaagcaaaaggaggaagtgagggctgcgctggagcagcgggagcaggatgctgtggaccaagtgaaggtgatcatggatgctctggatgagagagccaaggtgctgcatgaggacaagcagacccgggagcagctgcatagcatcagcgactctgtgttgtttctgcaggaatttggtgcattgatgagcaattactctctccccccacccctgcccacctatcatgtcctgctggagggggagggcctgggacagtcactaggcaacttcaaggacgacctgctcaatgtatgcatgcgccacgttgagaagatgtgcaaggcggacctgagccgtaacttcattgagaggaaccacatggagaacggtggtgaccatcgctatgtgaacaactacacgaacagcttcgggggtgagtggagtgcaccggacaccatgaagagatactccatgtacctgacacccaaaggtggggtccggacatcataccagccctcgtctcctggccgcttcaccaaggagaccacccagaagaatttcaacaatctctatggcaccaaaggtaactacacctcccgggtctgggagtactcctccagcattcagaactctgacaatgacctgcccgtcgtccaaggcagctcctccttctccctgaaaggctatccctccctcatgcggagccaaagccccaaggcccagccccagacttggaaatctggcaagcagactatgctgtctcactaccggccattctacgtcaacaaaggcaacgggattgggtccaacgaagccccatgagctcctggcggaaggaacgaggcgccacacccctgctcttcctcctgaccctgctgctcttgccttctaagctactgtgcttgtctgggtgggagggagcctggtcctgcacctgccctctgcagccctctgccagcctcttgggggcagttccggcctctccgacttccccactggccacactccattcagactcctttcctgccttgtgacctcagatggtcaccatcattcctgtgctcagaggccaacccatcacaggggtgagataggttggggcctgccctaacccgccagcctcctcctctcgggctggatctgggggctagcagtgagtacccgcatggtatcagcctgcctctcccgcccacgccctgctgtctccaggcctatagacgtttctctccaaggccctatcccccaatgttgtcagcagatgcctggacagcacagccacccatctcccattcacatggcccacctcctgcttcccagaggactggccctacgtgctctctctcgtcctacctatcaatgcccagcatggcagaacctgcagtggccaagggctgcagatggaaacctctcagtgtcttgacatcaccctacccaggcggtgggtctccaccacagccactttgagtctgtggtccctggagggtggcttctcctgactggcaggatgaccttagccaagatattcctctgttccctctgctgagataaagaattcccttaacatgatataatccacccatgcaaatagctactggcccagctaccatttaccatttgcctacagaatttcattcagtctacactttggcattctctctggcgatggagtgtggctgggctgaccgcaaaaggtgccttacacactgcccccaccctcagccgttgccccatcagaggctgcctcctccttctgattaccccccatgttgcatatcagggtgctcaaggattggagaggagacaaaaccaggagcagcacagtggggacatctcccgtctcaacagccccaggcctatgggggctctggaaggatgggccagcttgcaggggttggggagggagacatccagcttgggctttcccctttggaataaaccattggtctgtc

SEQ ID NO: 1020 - DNA, 1766 bp, Homo sapiens
  Genbank Accession No. L29254
tgtacccctgaatcataagccataaggtcctttcctgggttgttggcctgtaaaattggctttgcagaaccacagtgctatcaataaatacggccaagctgatctagtgcttggtagtttggggcacctggctctttcctcttgaaggttgaatataatgctagtgctcttttacaggtggccagtggcgatttcgatgcttgcgtccaagtctgtgaatgtaaaacccctcgtcacccataggtttcctctggagaaagctctggaggcctttgaaacatttaaaaagggattggggttgaaaatcatgctcaagtgtgaccccagtgaccagaatccctgatgttaatgggctctgctcatccccacagtctcgggatctcagggcacaatggctggacaggggtgggctctgatgcagaactttctcttttgaatgttaagaataactaatacaattcattgtgaacagaagtccttaagcagaggaattggtgtgccttaaagatacaatctgggatagtttgggggaacttgtagccagaatgccctgttcatgctgagcaaagttcagcaagtagagcagagtttggcaggcaggtgccaggaactccccttcttcctggagtgccttcattgaggaaggaaatctggcccttgggtttcctggttccactgctactgacccagaggggaatgagggctgagttatgaaaagataacttcatgaagacttaactggcccagaagctgattttcatgaaaatctgccactcagggtctgggatgaaggcttgtcagcacttccagtttagaacgcaatgtttctagagacatattggctgtttgttttgatgataaaaggagaataagaaaaggcatcactttcctggatccaggataatttttaaaccaatcaaatgaaaaaaacaaacaaacaaaaaaggaaatgtcatgtgaggttaaaccagtttgcattcccctaatgtggaaaaagtaagaggactactcagcactgtttgaagattgcctcttctacagcttctgagaattgtgttatttcacttgccaagtgaaggaccccctccccaacatgccccagcccacccctaagcatggtcccttgtcaccaggcaaccaggaaactgctacttgtggacctcaccagagaccaggagggtttggttagctcacaggacttcccccaccccagaagattagcatcccatactagactcatactcaactcaactaggctcatactcaattgatggttattagacaattccatttctttctggttattataaacagaaaatctttcctcttctcattaccagtaaaggctcttggtatctttctgttggaatgatttctatgaacttgtcttattttaatggtgggttttttttctggtaagatttagacctaaatcgcatcatgccaacttgtgactttgagactattcatcaagaatgaggatatagtagccatgacatagcttgagctatagcctttaattccttactttggctatgggtggagggtgagtttgaagaggttctgattttcttgtaacctgggaaagccatgaccttgtgcccgattctttcagattgctttgggtaataaatattggtggtggtatctgactcatgctgctgtttatggtcctgtttagtggggaatggactcaggttacccatttcccagagggaaggatcccaggatttttgaaggttacatattttctgtaccaaatataa

SEQ ID NO: 1021 - DNA, 2439 bp, Homo sapiens
  Genbank Accession No. L32137
cagcacccagctccccgccaccgccatggtccccgacaccgcctgcgttcttctgctcaccctggctgccctcggcgcgtccggacagggccagagcccgttgggctcagacctgggcccgcagatgcttcgggaactgcaggaaaccaacgcggcgctgcaggacgtgcgggactggctgcggcagcaggtcagggagatcacgttcctgaaaaacacggtgatggagtgtgacgcgtgcgggatgcagcagtcagtacgcaccggcctacccagcgtgcggcccctgctccactgcgcgcccggcttctgcttccccggcgtggcctgcatccagacggagagcggcggccgctgcggcccctgccccgcgggcttcacgggcaacggctcgcactgcaccgacgtcaacgagtgcaacgcccacccctgcttcccccgagtccgctgtatcaacaccagcccggggttccgctgcgaggcttgcccgccggggtacagcggccccacccaccagggcgtggggctggctttcgccaaggccaacaagcaggtttgcacggacatcaacgagtgtgagaccgggcaacataactgcgtccccaactccgtgtgcatcaacacccggggctccttccagtgcggcccgtgccagcccggcttcgtgggcgaccaggcgtccggctgccagcgcggcgcacagcgcttctgccccgacggctcgcccagcgagtgccacgagcatgcagactgcgtcctagagcgcgatggctcgcggtcgtgcgtgtgtcgcgttggctgggccggcaacgggatcctctgtggtcgcgacactgacctagacggcttcccggacgagaagctgcgctgcccggagccgcagtgccgtaaggacaactgcgtgactgtgcccaactcagggcaggaggatgtggaccgcgatggcatcggagacgcctgcgatccggatgccgacggggacggggtccccaatgaaaaggacaactgcccgctggtgcggaacccagaccagcgcaacacggacgaggacaagtggggcgatgcgtgcgacaactgccggtcccagaagaacgacgaccaaaaggacacagaccaggacggccggggcgatgcgtgcgacgacgacatcgacggcgaccggatccgcaaccaggccgacaactgccctagggtacccaactcagaccagaaggacagtgatggcgatggtataggggatgcctgtgacaactgtccccagaagagcaacccggatcaggcggatgtggaccacgactttgtgggagatgcttgtgacagcgatcaagaccaggatggagacggacatcaggactctcgggacaactgtcccacggtgcctaacagtgcccaggaggactcagaccacgatggccagggtgatgcctgcgacgacgacgacgacaatgacggagtccctgacagtcgggacaactgccgcctggtgcctaaccccggccaggaggacgcggacagggacggcgtgggcgacgtgtgccaggacgactttgatgcagacaaggtggtagacaagatcgacgtgtgtccggagaacgctgaagtcacgctcaccgacttcagggccttccagacagtcgtgctggacccggagggtgacgcgcagattgaccccaactgggtggtgctcaaccagggaagggagatcgtgcagacaatgaacagcgacccaggcctggctgtgggttacactgccttcaatggcgtggacttcgagggcacgttccatgtgaacacggtcacggatgacgactatgcgggcttcatctttggctaccaggacagctccagcttctacgtggtcatgtggaagcagatggagcaaacgtattggcaggcgaaccccttccgtgctgtggccgagcctggcatccaactcaaggctgtgaagtcttccacaggccccggggaacagctgcggaacgctctgtggcatacaggagacacagagtcccaggtgcggctgctgtggaaggacccgcgaaacgtgggttggaaggacaagaagtcctatcgttggttcctgcagcaccggccccaagtgggctacatcagggtgcgattctatgagggccctgagctggtggccgacagcaacgtggtcttggacacaaccatgcggggtggccgcctgggggtcttctgcttctcccaggagaacatcatctgggccaacctgcgttaccgctgcaatgacaccatcccagaggactatgagacccatcagctgcggcaagcctagggaccagggtgaggacccgccggatgacagccaccctcaccgcggctggatgggggctctgcacccagcccaaggggtggccgtcctgagggggaagtgagaagggctcagagaggacaaaataaagtgtgtgtgcaggg

SEQ ID NO: 1022 - DNA, 1413 bp, Homo sapiens
  Genbank Accession No. L34041
cgggccggctcaggcagagacgcggcaccatggctagcaagaaagtctgcattgtaggctccgggaactggggctcagccatcgccaagatcgtgggtggcaatgcagcccagctcgcacagtttgacccacgggtgaccatgtgggtatttgaggaagacattggaggcaaaaagctgactgagatcatcaacacgcagcatgagaatgtcaaatacctgccagggcacaagttgcccccaaatgtggtggctgtcccagatgtggtccaggctgcagaggatgctgacatcctgatctttgtggtgccccatcagttcatcggcaagatctgtgaccagctcaagggccatctgaaggcaaaccccactggcatatctcttattaagggggtagacgagggccccaatgggctgaagctcatctcggaagtgattggggagcgcctcggcatccccatgagtgtgctgatgggggccaacattgccagcgaggtggctgatgagaagttctgtgagacaaccattggctgcaaggacccggcccagggacaactcctgaaagagctgatgcagacaccaaacttccgtatcacagtggtgcaagaggtggacacagtagagatctgtggagccttaaagaatgtagtggccgtgggggctggcttctgtgatggcctgggctttggcgacaacaccaaggcggcagtgatccggctgggactcatggagatgatagccttcgccaagctcttctgcagtggccctgtgtcctctgccaccttcttggagagctgtggtgttgctgacctgatcactacctgctatggagggcggaaccggaaagtggctgaggcctttgcgcgtacaggaaagtccattgagcagctggagaaagagttgctgaatgggcagaaactgcaggggcccgagacagcccgggagctatacagcatcctccagcacaagggcctggtagacaagtttcccttgttcatggctgtgtacaaggtgtgctacgagggccagccagtgggtgaattcatccactgcctgcagaatcatccagaacatatgtgagtggggccaggcccaggccaggcgtttttaccccagtggagaccagcagaagcctggggtacctagtcaccaggatctccaggactcccagggagcagagtcttctcatcgtttcactggaggacaggtggctatggggcccagctacgcacctggagatcctgaactgtcaagccactggcagcctcatgccaccacattcgccagaaatgcagttgccctgtccctctccagatgtggggctttctccatatcctctgggaggggtggaatcaagccccagtgctgcctgcttggtggcgggggtgatgtatgtggagaagggtcggggccg

SEQ ID NO: 1023 - DNA, 5433 bp, Homo sapiens
  Genbank Accession No. L34155
atgggatggctgtggatctttggggcagccctggggcagtgtctgggctacagttcacagcagcaaagggtgccatttcttcagcctcccggtcaaagtcaactgcaagcgagttatgtggagtttagacccagccagggttgtagccctggatactatcgggatcataaaggcttgtataccggacggtgtgttccctgcaattgcaacggacattcaaatcaatgccaggatggctcaggcatatgtgttaactgtcagcacaacaccgcgggagagcactgtgaacgctgccaggagggctactatggcaacgccgtccacggatcctgcagggcctgcccatgtcctcacactaacagctttgccactggctgtgtggtgaatgggggagacgtgcggtgctcctgcaaagctgggtacacaggaacacagtgtgaaaggtgtgcaccgggatatttcgggaatccccagaaattcggaggtagctgccaaccatgcagttgtaacagcaatggccagctgggcagctgtcatcccctgactggagactgcataaaccaagaacccaaagatagcagccctgcagaagaatgtgatgattgcgacagctgtgtgatgaccctcctgaacgacctggccaccatgggcgagcagctccgcctggtcaagtctcagctgcagggcctgagtgccagcgcagggcttctggagcagatgaggcacatggagacccaggccaaggacctgaggaatcagttgctcaactaccgttctgccatttcaaatcatggatcaaaaatagaaggcctggaaagagaactgactgatttgaatcaagaatttgagactttgcaagaaaaggctcaagtaaattccagaaaagcacaaacattaaacaacaatgttaatcgggcaacacaaagcgcaaaagaactggatgtgaagattaaaaatgtcatccggaatgtgcacattcttttaaagcagatctctgggacagatggagagggaaacaacgtgccttcaggtgacttttccagagagtgggctgaagcccagcgcatgatgagggaactgcggaacaggaactttggaaagcacctcagagaagcagaagctgataaaagggagtcgcagctcttgctgaaccggataaggacctggcagaaaacccaccagggggagaacaatgggcttgctaacagtatccgggattctttaaatgaatacgaagccaaactcagtgaccttcgtgctcggctgcaggaggcagctgcccaagccaagcaggcaaatggcttgaaccaagaaaacgagagagctttgggagccattcagagacaagtgaaagaaataaattccctgcagagtgatttcaccaagtatctaaccactgcagactcatctttgttgcaaaccaacattgcgctgcagctgatggagaaaagccagaaggaatatgaaaaattagctgccagtttaaatgaagcaagacaagaactaagtgacaaagtaagagaactttccagatctgctggcaaaacatcccttgtggaggaggcagaaaagcacgcgcggtccttacaagagctggcaaagcagctggaagagatcaagagaaacgccagcggggatgagctggtgcgctgtgctgtggatgccgccaccgcctacgagaacatcctcaatgccatcaaagcggccgaggacgcagccaacagggctgccagtgcatctgaatctgccctccagacagtgataaaggaagatctgccaagaaaagctaaaaccctgagttccaacagtgataaactgttaaatgaagccaagatgacacaaaagaagctaaagcaagaagtcagtccagctctcaacaacctacagcaaaccctgaatattgtgacagttcagaaagaagtgatagacaccaatctcacaactctccgagatggtcttcatgggatacagagaggtgatattgatgctatgatcagtagtgcaaagagcatggtcagaaaggccaacgacatcacagatgaggttctggatgggctcaaccccatccagacagatgtggaaagaattaaggacacctatgggaggacacagaacgaagacttcaaaaaggctctgactgatgcagataactcggtgaataagttaaccaacaaactacctgatctttggcgcaagattgaaagtatcaaccaacagctgttgcccttgggaaacatctctgacaacatggacagaatacgagaactaattcagcaggccagagatgctgccagtaaggttgctgtccccatgaggttcaatggtaaatctggagtcgaagtccgactgccaaatgacctggaagatttgaaaggatatacatctctgtccttgtttctccaaaggcccaactcaagagaaaatgggggtactgagaatatgtttgtgatgtaccttggaaataaagatgcctcccgggactacatcggcatggcagttgtggatggccagctcacctgtgtctacaacctgggggaccgtgaggctgaactccaagtggaccagatcttgaccaagagtgagactaaggaggcagttatggatcgggtgaaatttcagagaatttatcagtttgcaaggcttaattacaccaaaggagccacatccagtaaaccagaaacacccggagtctatgacatggatggtagaaatagcaatacactccttaatttggatcctgaaaatgttgtattttatgttggaggttacccacctgattttaaacttcccagtcgactaagtttccctccatacaaaggttgtattgaattagatgacctcaatgaaaatgttctgagcttgtacaacttcaaaaaaacattcaatctcaacacaactgaagtggagccttgtagaaggaggaaggaagagtcagacaaaaattattttgaaggtacgggctatgctcgagttccaactcaaccacatgctcccatcccaacctttggacagacaattcagaccaccgtggatagaggcttgctgttctttgcagaaaacggggatcgcttcatatctctaaatatagaagatggcaagctcatggtgagatacaaactgaattcagagctaccaaaagagagaggagttggagacgccataaacaacggcagagaccattcgattcagatcaaaattggaaaactccaaaagcgtatgtggataaatgtggacgttcaaaacactataattgatggtgaagtatttgatttcagcacatattatctgggaggaattccaattgcaatcagggaaagatttaacatttctacgcctgctttccgaggctgcatgaaaaatttgaagaaaaccagtggtgtcgttagattgaatgatactgtgggagtaaccaaaaagtgctcggaagactggaagcttgtgcgatctgcctcattctccagaggaggacaattgagtttcactgatttgggcttaccacctactgaccacctccaggcctcatttggatttcagacctttcaacccagtggcatattattagatcatcagacatggacaaggaacctgcaggtcactctggaagatggttacattgaattgagcaccagcgatagcggcggcccaatttttaaatctccacagacgtatatggatggtttactgcattatgtatctgtaataagcgacaactctggactacggcttctcatcgatgaccagcttctgagaaatagcaaaaggctaaaacacatttcaagttcccggcagtctctgcgtctgggcgggagcaattttgagggttgtattagcaatgtttttgtccagaggttatcactgagtcctgaagtcctagatttgaccagtaactctctcaagagagatgtgtccctgggaggctgcagtttaaacaaaccaccttttctaatgttgcttaaaggttctaccaggtttaacaagaccaagacttttcgtatcaaccagctgttgcaggacacaccagtggcctccccaaggagcgtgaaggtgtggcaagatgcttgctcaccacttcccaagacccaggccaatcatggagccctccagtttggggacattcccaccagccacttgctattcaagcttcctcaggagctgctgaaacccaggtcacagtttgctgtggacatgcagacaacatcctccagaggactggtgtttcacacgggcactaagaactcctttatggctctttatctttcaaaaggacgtctggtctttgcactggggacagatgggaaaaaattgaggatcaaaagcaaggagaaatgcaatgatgggaaatggcacacggtggtgtttggccatgatggggaaaaggggcgcttggttgtggatggactgagggcccgggagggaagtttgcctggaaactccaccatcagcatcagagcgccagtttacctgggatcacctccatcagggaaaccaaagagcctccccacaaacagctttgtgggatgcctgaagaactttcagctggattcaaaacccttgtataccccttcttcaagcttcggggtgtcttcctgcttgggtggtcctttggagaaaggcatttatttctctgaagaaggaggtcatgtcgtcttggctcactctgtattgttggggccagaatttaagcttgttttcagcatccgcccaagaagtctcactgggatcctaatacacatcggaagtcagcccgggaagcacttatgtgtttacctggaggcaggaaaggtcacggcctctatggacagtggggcaggtgggacctcaacgtcggtcacaccaaagcagtctctgtgtgatggacagtggcactcggtggcagtcaccataaaacaacacatcctgcacctggaactggacacagacagtagctacacagctggacagatccccttcccacctgccagcactcaagagccactacaccttggaggtgctccagccaatttgacgacactgaggatccctgtgtggaaatcattctttggctgtctgaggaatattcatgtcaatcacatccctgtccctgtcactgaagccttggaagtccaggggcctgtcagtctgaatggttgtcctgaccagtaacccaagcctatttcacagcaaggaaattcaccttcaaaagcactgattacccaatgcacctccctccccagctcgagatcattcttcaattaggacacaaaccagacaggtttaatagcgaatctaattttgaattctgaccatggatacccatcactttggcattcagtgctacatgtgtattttatataaaaatcccatttcttgaagataaaaaaattgttattcaaattgttatgcacagaatgtttttggtaatattaatttccactaaaaaattaaatgtctttt

SEQ ID NO: 1024 - DNA, 3231 bp, Homo sapiens
  Genbank Accession No. L35594
cgtgaaggcaaagagaacacgctgcaaaaggcttccaagaatcctcgacatggcaaggaggagctcgttccagtcgtgtcagataatatccctgttcacttttgccgttggagtcagtatctgcttaggattcactgcacatcgaattaagagagcagaaggatgggaggaaggtcctcctacagtgctatcagactccccctggaccaacatctccggatcttgcaagggcaggtgctttgaacttcaagaggctggacctcctgattgtcgctgtgacaacttgtgtaagagctataccagttgctgccatgactttgatgagctgtgtttgaagacagcccgtggctgggagtgtactaaggacagatgtggagaagtcagaaatgaagaaaatgcctgtcactgctcagaggactgcttggccaggggagactgctgtaccaattaccaagtggtttgcaaaggagagtcgcattgggttgatgatgactgtgaggaaataaaggccgcagaatgccctgcagggtttgttcgccctccattaatcatcttctccgtggatggcttccgtgcatcatacatgaagaaaggcagcaaagtcatgcctaatattgaaaaactaaggtcttgtggcacacactctccctacatgaggccggtgtacccaactaaaacctttcctaacttatacactttggccactgggctatatccagaatcacatggaattgttggcaattcaatgtatgatcctgtatttgatgccacttttcatctgcgagggcgagagaaatttaatcatagatggtggggaggtcaaccgctatggattacagccaccaagcaaggggtgaaagctggaacattcttttggtctgttgtcatccctcacgagcggagaatattaaccatattgcggtggctcaccctgccagatcatgagaggccttcggtctatgccttctattctgagcaacctgatttctctggacacaaatatggccctttcggccctgaggagagtagttatggctcaccttttactccggctaagagacctaagaggaaagttgcccctaagaggagacaggaaagaccagttgctcctccaaagaaaagaagaagaaaaatacataggatggatcattatgctgcggaaactcgtcaggacaaaatgacaaatcctctgagggaaatcgacaaaattgtggggcaattaatggatggactgaaacaactaaaactgcgtcggtgtgtcaacgtcatctttgtcggagaccatggaatggaagatgtcacatgtgatagaactgagttcttgagtaattacctaactaatgtggatgatattactttagtgcctggaactctaggaagaattcgatccaaatttagcaacaatgctaaatatgaccccaaagccattattgccaatctcacgtgtaaaaaaccagatcagcactttaagccttacttgaaacagcaccttcccaaacgtttgcactatgccaacaacagaagaattgaggatatccatttattggtggaacgcagatggcatgttgcaaggaaacctttggatgtttataagaaaccatcaggaaaatgctttttccagggagaccacggatttgataacaaggtcaacagcatgcagactgtttttgtaggttatggcccaacatttaagtacaagactaaagtgcctccatttgaaaacattgaactttacaatgttatgtgtgatctcctgggattgaagccagctcctaataatgggacccatggaagtttgaatcatctcctgcgcactaataccttcaggccaaccatgccagaggaagttaccagacccaattatccagggattatgtaccttcagtctgattttgacctgggctgcacttgtgatgataaggtagagccaaagaacaagttggatgaactcaacaaacggcttcatacaaaagggtctacagaagagagacacctcctctatgggcgacctgcagtgctttatcggactagatatgatatcttatatcacactgactttgaaagtggttatagtgaaatattcctaatgctactctggacatcatatactgtttccaaacaggctgaggtttccagcgttcctgaccatctgaccagttgcgtccggcctgatgtccgtgtttctccgagtttcagtcagaactgtttggcctacaaaaatgataagcagatgtcctacggattcctctttcctccttatctgagctcttcaccagaggctaaatatgatgcattccttgtaaccaatatggttccaatgtatcctgctttcaaacgggtctggaattatttccaaagggtattggtgaagaaatatgcttcggaaagaaatggagttaacgtgataagtggaccaatcttcgactatgactatgatggcttacatgacacagaagacaaaataaaacagtacgtggaaggcagttccattcctgttccaactcactactacagcatcatcaccagctgtctggatttcactcagcctgccgacaagtgtgacggccctctctctgtgtcctccttcatcctgcctcaccggcctgacaacgaggagagctgcaatagctcagaggacgaatcaaaatgggtagaagaactcatgaagatgcacacagctagggtgcgtgacattgaacatctcaccagcctggacttcttccgaaagaccagccgcagctacccagaaatcctgacactcaagacatacctgcatacatatgagagcgagatttaactttctgagcatctgcagtacagtcttatcaactggttgtatatttttatattgtttttgtatttattaatttgaaaccaggacattaaaaatgttagtattttaatcctgtaccaaatctgacatattatgcctgaatgactccactgtttttctctaatgcttgatttaggtagccttgtgttctgagtagagcttgtaataaatactgcagcttgagaaaaagtggaagcttctaaatggtgctgcagatttgatatttgcattgaggaaatattaattttccaatgcacagttgccacatttagtcctgtactgtatggaaacactgattttgtaaagttgcctttatttgctgttaactgttaactatgacagatatatttaagccttataaaccaatcttaaacataataaatcacacattcagtttt

SEQ ID NO: 1025 - DNA, 958 bp, Homo sapiens
  Genbank Accession No. L37747
aaaagaaaaggttagaaagatgagagatgataaagggtccatttgaggttaggtaatatggtttggtatccctgtagttaaaagtttttgtcttattttagaatactgtgatctatttctttagtattaatttttccttctgttttcctcatctagggaaccccaagagcatccaatagaagctgtgcaattatgtaaaattttcaactgtcttcctcaaaataaagaagtatggtaatctttacctgtatacagtgcagagccttctcagaagcacagaatatttttatatttcctttatgtgaatttttaagctgcaaatctgatggccttaatttcctttttgacactgaaagttttgtaaaagaaatcatgtccatacactttgttgcaagatgtgaattattgacactgaacttaataactgtgtactgttcggaaggggttcctcaaattttttgactttttttgtatgtgtgttttttctttttttttaagttcttatgaggaggggagggtaaataaaccactgtgcgtcttggtgtaatttgaagattgccccatctagactagcaatctcttcattattctctgctatatataaaacggtgctgtgagggaggggaaaagcatttttcaatatattgaacttttgtactgaatttttttgtaataagcaatcaaggttataattttttttaaaatagaaattttgtaagaaggcaatattaacctaatcaccatgtaagcactctggatgatggattccacaaaacttggttttatggttacttcttctcttagattcttaattcatgaggagggtgggggagggaggtggagggagggaagggtttctctattaaaatgcattcgttgtgttttttaagatagtgtaacttgcttaaatttcttatgtgacattaacaaataaaaaagctcttttaatattagataa

SEQ ID NO: 1026 - DNA, 1757 bp, Homo sapiens
  Genbank Accession No. L38486
cagcatgaaggcactcctggccctgccgctgctgctgcttctctccacgcccccgtgtgccccccaggtctccgggatccgaggagatgctctggagaggttttgccttcagcaacccctggactgtgacgacatctatgcccagggctaccagtcagacggcgtgtacctcatctacccctcgggccccagtgtgcctgtgcccgtcttctgtgacatgaccaccgagggcgggaagtggacggttttccagaagagattcaatggctcagtaagtttcttccgcggctggaatgactacaagctgggcttcggccgtgctgatggagagtactggctggggctgcagaacatgcacctcctgacactgaagcagaagtatgagctgcgagtggacttggaggactttgagaacaacacggcctatgccaagtacgctgacttctccatctccccgaacgcggtcagcgcagaggaggatggctacaccctctttgtggcaggctttgaggatggcggggcaggtgactccctgtcctaccacagtggccagaagttctctaccttcgaccgggaccaggacctctttgtgcagaactgcgcagctctctcctcaggagccttctggttccgcagctgccactttgccaacctcaatggcttctacctaggtggctcccacctctcttatgccaatggcatcaactgggcccagtggaagggcttctactactccctcaaacgcactgagatgaaaatccgccgggcctgaagggctggccccctcaggcacctttcctcccctggacacccatggtctccatgagtgctccctctgctgcccctgatgcatgcttctgctgattcccgagcaccaactccttacaagggggccttgtggctctcagccatgccacatccctgtcacacacccagggcatccattcctaagccagacccggctcccctacacctgaagttacactgccagcagttccccaggcctcttccgagaggcacatggttctagcctggacctggctgggctccatgagaatgagttgcctccaccctgtcccaacagctgacagccaggagccactctcccagctgcaggcctttgtggtgcatcttgtcctgcttcctcactgtggacccctgtctgggccaccctagtgtgctaagctgagcagtgcagtgtgaacagggcccatggtgtattctaggccacagcccagcactcctctgggctgctctcaaaccatgtcccatcttcagcatccctcccaccaacttactcccctgtggtgagtaccgtggaaccccagcccacctcactatcatactcagcttcccctgatggcccatcccagcccctgaagctctatgccaagaacacagctaccgcacaccaccctgaaacagccacagccaaggtaggcatgcatatgaggtcttccccataccctctgggtgttgagaggtttagccacatgagggagcagaggacaatctctgcagggctgggagtgggtagggactgaaggtctcaataaaccttcagaacctgaatgaactggcttcatacacacaaacatatttgtttatcccccaaatgtaggcacctggctcctccttgctcccctgctgatggtgtcctaccccgaactccaaaaattacacctggagtcaggtgcagaagggaaccttgtatttcacaggcctcattttgatggcaaaaagacagtgtaataata

SEQ ID NO: 1027 - DNA, 995 bp, Homo sapiens
  Genbank Accession No. L47276
taaaatgtgaggcgattattttaagtaattatcttaccaagcccaagactggttttaaagttacctgaagctcttaacttcctcccctctgaatttagtttggggaaggtgtttttagtacaagacatcaaagtgaagtaaagcccaagtgttctttagctttttataatactgtctaaatagtgaccatctcatgggcattgttttcttctctgctttgtctgtgttttgagtctgctttcttttgtctttaaaacctgatttttaagttcttctgaactgtagaaatagctatctgatcacttcagcgtaaagcagtgtgtttattaaccatccactaagctaaaactagagcagtttgatttaaaagtgtcactcttcctccttttctactttcagtagatatgagatagagcataattatctgttttatcttagttttatacataatttaccatcagatagaactttatggttctagtacagatactctactacactcagcctcttatgtgccaagtttttctttaagcaatgagaaattgctcatgttcttcatcttctcaaatcatcagaggccaaagaaaaacactttggctgtgtctataacttgacacagtcaatagaatgaagaaaattagagtagttatgtgattatttcagctcttgacctgtcccctctggctgcctctgagtctgaatctcccaaagagagaaaccaatttctaagaggactggattgcagaagactcggggacaacatttgatccaagatcttaaatgttatattgataaccatgctcagcaatgagctattagattcattttgggaaatctccataatttcaatttgtaaactttgttaagacctgtctacattgttatatgtgtgtgacttgagtaatgttatcaacgtttttgtaaatatttactatgtttttctattagctaaattccaacaattttgtactttaataaaatgttctaaacattgc

SEQ ID NO: 1028 - DNA, 1832 bp, Homo sapiens
  Genbank Accession No. L48215
ccaactcctaagccagtgccagaagagccaaggacaggtacggctgtcatcacttagacctcaccctgtggagccacaccctagggttggccaatctactcccaggagcagggagggcaggagccagggctgggcatacaagtcagggcagagccatctattgcttacatttgcttctgacacaactgtgttcactagcaacctcaaacagacaccatggtgcacctgactcctgaggagaagtctgccgttactgccctgtggggcaaggtgaacgtggatgaagttggtggtgaggccctgggcaggttggtatcaaggttacaagacaggtttaaggagaccaatagaaactgggcatgtggagacagagaagactcttgggtttctgataggcactgactctctctgcctattggtctattttcccacccttaggctgctggtggtctacccttggacccagaggttctttgagtcctttggggatctgtccactcctgatgctgttatgggcaaccctaaggtgaaggctcatggcaagaaagtgctcggtgcctttagtgatggcctggctcacctggacaacctcaagggcacctttgccacactgagtgagctgcactgtgacaagctgcacgtggatcctgagaacttcagggtgagtctatgggacccttgatgttttctttccccttcttttctatggttaagttcatgtcataggaaggggagaagtaacagggtacagtttagaatgggaaacagacgaatgattgcatcagtgtggaagtctcaggatcgttttagtttcttttatttgctgttcataacaattgttttcttttgtttaattcttgctttctttttttttcttctccgcaatttttactattatacttaatgccttaacattgtgtataacaaaaggaaatatctctgagatacattaagtaacttaaaaaaaaactttacacagtctgcctagtacattactatttggaatatatgtgtgcttatttgcatattcataatctccctactttattttcttttatttttaattgatacataatcattatacatatttatgggttaaagtgtaatgttttaatatgtgtacacatattgaccaaatcagggtaattttgcatttgtaattttaaaaaatgctttcttcttttaatatacttttttgtttatcttatttctaatactttccctaatctctttctttcagggcaataatgatacaatgtatcatgcctctttgcaccattctaaagaataacagtgataatttctgggttaaggcaatagcaatatttctgcatataaatatttctgcatataaattgtaactgatgtaagaggtttcatattgctaatagcagctacaatccagctaccattctgcttttattttatggttgggataaggctggattattctgagtccaagctaggcccttttgctaatcatgttcatacctcttatcttcctcccacagctcctgggcaacgtgctggtctgtgtgctggcccatcactttggcaaagaattcaccccaccagtgcaggctgcctatcagaaagtggtggctggtgtggctaatgccctggcccacaagtatcactaagctcgctttcttgctgtccaatttctattaaaggttcctttgttccctaagtccaactactaaactgggggatattatgaagggccttgagcatctggattctgcctaataaaaaacatttattttcattgcaatgatgtatttaaattatttctgaatattttactaaaaagggaatgtgggaggtcagtg

SEQ ID NO: 1029 - DNA, 3775 bp, Homo sapiens
  Genbank Accession No. L49169
cattcataagactcagagctacggccacggcagggacacgcggaaccaagacttggaaacttgattgttgtggttcttcttgggggttatgaaatttcattaatcttttttttttccggggagaaagtttttggaaagattcttccagatatttcttcattttcttttggaggaccgacttactttttttggtcttctttattactcccctccccccgtgggacccgccggacgcgtggaggagaccgtagctgaagctgattctgtacagcgggacagcgctttctgcccctgggggagcaacccctccctcgcccctgggtcctacggagcctgcactttcaagaggtacagcggcatcctgtgggggcctgggcaccgcaggaagactgcacagaaactttgccattgttggaacgggacgttgctccttccccgagcttccccggacagcgtactttgaggactcgctcagctcaccggggactcccacggctcaccccggacttgcaccttacttccccaacccggccatagccttggcttcccggcgacctcagcgtggtcacaggggcccccctgtgcccagggaaatgtttcaggctttccccggagactacgactccggctcccggtgcagctcctcaccctctgccgagtctcaatatctgtcttcggtggactccttcggcagtccacccaccgccgcggcctcccaggagtgcgccggtctcggggaaatgcccggttccttcgtgcccacggtcaccgcgatcacaaccagccaggacctccagtggcttgtgcaacccaccctcatctcttccatggcccagtcccaggggcagccactggcctcccagcccccggtcgtcgacccctacgacatgccgggaaccagctactccacaccaggcatgagtggctacagcagtggcggagcgagtggcagtggtgggccttccaccagcggaactaccagtgggcctgggcctgcccgcccagcccgagcccggcctaggagaccccgagaggagacgctcaccccagaggaagaggagaagcgaagggtgcgccgggaacgaaataaactagcagcagctaaatgcaggaaccggcggagggagctgaccgaccgactccaggcggagacagatcagttggaggaagaaaaagcagagctggagtcggagatcgccgagctccaaaaggagaaggaacgtctggagtttgtgctggtggcccacaaaccgggctgcaagatcccctacgaagaggggcccgggccgggcccgctggcggaggtgagagatttgccgggctcagcaccggctaaggaagatggcttcagctggctgctgccgcccccgccaccaccgcccctgcccttccagaccagccaagacgcaccccccaacctgacggcttctctctttacacacagtgaagttcaagtcctcggcgaccccttccccgttgttaacccttcgtacacttcttcgtttgtcctcacctgcccggaggtctccgcgttcgccggcgcccaacgcaccagcggcagtgaccagccttccgatcccctgaactcgccctccctcctcgctcggtgaactctttagacacacaaaacaaacaaacacatgggggagagagacttggaagaggaggaggaggaggagaaggaggagagagaggggaagagacaaagtgggtgtgtggcctccctggctcctccgtctgaccctctgcggccactgcgccactgccatcggacaggaggattccttgtgttttgtcctgcctcttgtttctgtgccccggcgaggccggagagctggtgactttggggacagggggtgggaaggggatggacacccccagctgactgttggctctctgacgtcaacccaagctctggggatgggtggggaggggggcgggtgacgcccaccttcgggcagtcctgtgtgaggatgaagggacgggggtgggaggtaggctgtggggtgggctggagtcctctccagagaggctcaacaaggaaaaatgccactccctacccaatgtctcccacacccaccctttttttggggtgcccaggttggtttcccctgcactcccgaccttagcttattgatcccacatttccatggtgtgagatcctctttactctgggcagaagtgagcccccccttaaagggaattcgatgcccccctagaataatctcatccccccacccgacttcttttgaaatgtgaacgtccttccttgactgtctagccactccctcccagaaaaactggctctgattggaatttctggcctcctaaggctccccaccccgaaatcagcccccagccttgtttctgatgacagtgttatcccaagaccctgccccctgccagccgaccctcctggccttcctcgttgggccgctctgatttcaggcagcaggggctgctgtgatgccgtcctgctggagtgatttatactgtgaaatgagttggccagattgtggggtgcagctgggtggggcagcacacctctggggggataatgtccccactcccgaaagcctttcctcggtctcccttccgtccatcccccttcttcctcccctcaacagtgagttagactcaagggggtgacagaaccgagaagggggtgacagtcctccatccacgtggcctctctctctctcctcaggaccctcagccctggcctttttctttaaggtcccccgaccaatccccagcctaggacgccaacttctcccaccccttggcccctcacatcctctccaggaaggcagtgaggggctgtgacatttttccggagaagatttcagagctgaggctttggtacccccaaacccccaatatttttggactggcagactcaaggggctggaatctcatgattccatgcccgagtccgcccatccctgaccatggttttggctctcccaccccgccgttccctgcgcttcatctcatgaggatttctttatgaggcaaatttatattttttaatatcggggggtggaccacgccgccctccatccgtgctgcatgaaaaacattccacgtgccccttgtcgcgcgtctcccatcctgatcccagacccattccttagctatttatccctttcctggtttccgaaaggcaattatatctattatgtataagtaaatatattatatatggatgtgtgtgtgtgcgtgcgcgtgagtgtgtgagcgcttctgcagcctcggcctaggtcacgttggccctcaaagcgagccgttgaattggaaactgcttctagaaactctggctcagcctgtctcgggctgacccttttctgatcgtctcggcccctctgattgttcccgatggtctctctccctctgtcttttctcctccgcctgtgtccatctgaccgttttcacttgtctcctttctgactgtccctgccaatgctccagctgtcgtctgactctgggttcgttggggacatgagattttattttttgtgagtgagactgagggatcgtagatttttacaatctgtatctttgacaattctgggtgcgagtgtgagagtgtgagcagggcttgctcctgccaaccacaattcaatgaatccccgacccccctaccccatgctgtacttgtggttctctttttgtattttgcatctgaccccggggggctgggacagattggcaatgggccgtcccctctccccttggttctgcactgttgccaataaaaagctcttaaaaacgc

SEQ ID NO: 1030 - DNA, 2384 bp, Homo sapiens
  Genbank Accession No. M10905
atcaaacagaaatgactattgaaggcttgcagcccacagtggagtatgtggttagtgtctatgctcagaatccaagcggagagagtcagcctctggttcagactgcagtaaccaacattgatcgccctaaaggactggcattcactgatgtggatgtcgattccatcaaaattgcttgggaaagcccacaggggcaagtttccaggtacagggtgacctactcgagccctgaggatggaatccatgagctattccctgcacctgatggtgaagaagacactgcagagctgcaaggcctcagaccgggttctgagtacacagtcagtgtggttgccttgcacgatgatatggagagccagcccctgattggaacccagtccacagctattcctgcaccaactgacctgaagttcactcaggtcacacccacaagcctgagcgcccagtggacaccacccaatgttcagctcactggatatcgagtgcgggtgacccccaaggagaagaccggaccaatgaaagaaatcaaccttgctcctgacagctcatccgtggttgtatcaggacttatggtggccaccaaatatgaagtgagtgtctatgctcttaaggacactttgacaagcagaccagctcagggtgttgtcaccactctggagaatgtcagcccaccaagaagggctcgtgtgacagatgctactgagaccaccatcaccattagctggagaaccaagactgagacgatcactggcttccaagttgatgccgttccagccaatggccagactccaatccagagaaccatcaagccagatgtcagaagctacaccatcacaggtttacaaccaggcactgactacaagatctacctgtacaccttgaatgacaatgctcggagctcccctgtggtcatcgacgcctccactgccattgatgcaccatccaacctgcgtttcctggccaccacacccaattccttgctggtatcatggcagccgccacgtgccaggattaccggctacatcatcaagtatgagaagcctgggtctcctcccagagaagtggtccctcggccccgccctggtgtcacagaggctactattactggcctggaaccgggaaccgaatatacaatttatgtcattgccctgaagaataatcagaagagcgagcccctgattggaaggaaaaagacagacgagcttccccaactggtaacccttccacaccccaatcttcatggaccagagatcttggatgttccttccacagttcaaaagacccctttcgtcacccaccctgggtatgacactggaaatggtattcagcttcctggcacttctggtcagcaacccagtgttgggcaacaaatgatctttgaggaacatggttttaggcggaccacaccgcccacaacggccacccccataaggcataggccaagaccatacccgccgaatgtaggtgaggaaatccaaattggtcacattcccagggaagatgtagactatcacctgtacccacacggtccggggctcaatccaaatgcctctacaggacaagaagctctctctcagacaaccatctcatgggccccattccaggacacttctgagtacatcatttcatgtcatcctgttggcactgatgaagaacccttacagttcagggttcctggaacttctaccagtgcgactctgacaggcctcaccagaggtgccacctacaacatcatagtggaggcactgaaagaccagcagaggcataaggttcgggaagaggttgttaccgtgggcaactctgtcaacgaaggcttgaaccaacctacggatgactcgtgctttgacccctacacagtttcccattatgccgttggagatgagtgggaacgaatgtctgaatcaggctttaaactgttgtgccagtgcttaggctttggaagtggtcatttcagatgtgattcatctagatggtgccatgacaatggtgtgaactacaagattggagagaagtgggaccgtcagggagaaaatggccagatgatgagctgcacatgtcttgggaacggaaaaggagaattcaagtgtgaccctcatgaggcaacgtgttacgatgatgggaagacataccacgtaggagaacagtggcagaaggaatatctcggtgccatttgctcctgcacatgctttggaggccagcggggctggcgctgtgacaactgccgcagacctgggggtgaacccagtcccgaaggcactactggccagtcctacaaccagtattctcagagataccatcagagaacaaacactaatgttaattgcccaattgagtgcttcatgcctttagatgtacaggctgacagagaagattcccgagagtaa

SEQ ID NO: 1031 - DNA, 1486 bp, Homo sapiens
  Genbank Accession No. M12272
gaattccaaatgcactcaagcagagaagaaatccacaagtactcaccagcctcctggtctgcagagaagacagaatcaatatgagcacagcaggaaaagtaatcaaatgcaaagcagctgtgctatgggagttaaagaaacccttttccattgaggaggtagaggttgcacctcctaaggctcatgaagttcgcattaagatggtggctgcaggaatctgtcgttcagatgagcatgtggttagtggcaacctggtgaccccccttcctgtgattttaggccatgaggcagccggcatcgtggaaagtgttggagaaggggtgactacagtcaaaccaggtgataaagtcatcccgctctttactcctcagtgtggaaaatgcagaatttgtaaaaacccagaaagcaactactgcttgaaaaatgatctaggcaatcctcgggggaccctgcaggatggcaccaggaggttcacctgcagcgggaagcccatccaccacttcgtcggcgtcagcaccttctcccagtacacagtggtggatgagaatgcagtggccaaaattgatgcagcctcgcccctggagaaagtctgcctcattggctgtggattttcgactggttatgggtctgcagtcaaagttgccaaggtcaccccagggtctacctgtgctgtgtttggcctgggaggggtcggcctatctgttgttatgggctgtaaagcagctggagcagccagaatcattgctgtggacatcaacaaggacaaatttgcaaaggctaaagagttgggggccactgaatgcatcaaccctcaagactacaagaaacccattcaggaagtgctaaaggaaatgactgatggaggtgtggatttttcgtttgaagtcatcggtcggcttgacaccatgatggcttccctgttatgttgtcatgaggcatgtggcacaagtgtcattgtaggggtacctcctgattcccagaacctctcaataaaccctatgctgctactgactggacgcacgtggaaaggagctatttttggaggctttaagagtaaagaatctgtcccgaaacttgtggctgactttatggctaagaagttttcactggatgcattaataacaaatattttaccttttgaaaaaataaatgaaggatttgacctgcttcgctctggaaagagtatccgtaccgtcctgacgttttgaaacaatacagatgccttcccttgtagcagttttcagcctcctctaccctacatgatctggagcaacagctaggaaatatcattaattctgctcttcagagatgttaaaaataaattacacgtgggagctttccaaagaaatggaaattgatgggaaattatttgtcaagcaaatgtttaaaatccaaatgagaactaaataaagtgttgaacatcaactggggaattgaagccaataaaccttccttcttaaccattcaaaaaaaaaaaaaggaattc

SEQ ID NO: 1032 - DNA, 1450 bp, Homo sapiens
  Genbank Accession No. M12963
gatgcacttgagcagggaagaaatccacaaggactcaccagtctcctggtctgcagagaagacagaatcaacatgagcacagcaggaaaagtaatcaaatgcaaagcagctgtgctatgggagttaaagaaacccttttccattgaggaggtggaggttgcacctcctaaggcccatgaagttcgtattaagatggtggctgtaggaatctgtggcacagatgaccacgtggttagtggtaccatggtgaccccacttcctgtgattttaggccatgaggcagccggcatcgtggagagtgttggagaaggggtgactacagtcaaaccaggtgataaagtcatcccactcgctattcctcagtgtggaaaatgcagaatttgtaaaaacccggagagcaactactgcttgaaaaacgatgtaagcaatcctcaggggaccctgcaggatggcaccagcaggttcacctgcaggaggaagcccatccaccacttccttggcatcagcaccttctcacagtacacagtggtggatgaaaatgcagtagccaaaattgatgcagcctcgcctctagagaaagtctgtctcattggctgtggattttcaactggttatgggtctgcagtcaatgttgccaaggtcaccccaggctctacctgtgctgtgtttggcctgggaggggtcggcctatctgctattatgggctgtaaagcagctggggcagccagaatcattgcggtggacatcaacaaggacaaatttgcaaaggccaaagagttgggtgccactgaatgcatcaaccctcaagactacaagaaacccatccaggaggtgctaaaggaaatgactgatggaggtgtggatttttcatttgaagtcatcggtcggcttgacaccatgatggcttccctgttatgttgtcatgaggcatgtggcacaagtgtcatcgtaggggtacctcctgattcccaaaacctctcaatgaaccctatgctgctactgactggacgtacctggaagggagctattcttggtggctttaaaagtaaagaatgtgtcccaaaacttgtggctgattttatggctaagaagttttcattggatgcattaataacccatgttttaccttttgaaaaaataaatgaaggatttgacctgcttcactctgggaaaagtatccgtaccattctgatgttttgagacaatacagatgttttcccttgtggcagtcttcagcctcctctaccctacatgatctggagcaacagctgggaaatatcattaattctgctcatcacagattttatcaataaattacatttgggggctttccaaagaaatggaaattgatgtaaaattatttttcaagcaaatgtttaaaatccaaatgagaactaaataaagtgttgaacatcagctggggaattgaagccaataaaccttccttctt

SEQ ID NO: 1033 - DNA, 1970 bp, Homo sapiens
  Genbank Accession No. M13509
atattggagcagcaagaggctgggaagccatcacttaccttgcactgagaaagaagacaaaggccagtatgcacagctttcctccactgctgctgctgctgttctggggtgtggtgtctcacagcttcccagcgactctagaaacacaagagcaagatgtggacttagtccagaaatacctggaaaaatactacaacctgaagaatgatgggaggcaagttgaaaagcggagaaatagtggcccagtggttgaaaaattgaagcaaatgcaggaattctttgggctgaaagtgactgggaaaccagatgctgaaaccctgaaggtgatgaagcagcccagatgtggagtgcctgatgtggctcagtttgtcctcactgagggaaaccctcgctgggagcaaacacatctgaggtacaggattgaaaattacacgccagatttgccaagagcagatgtggaccatgccattgagaaagccttccaactctggagtaatgtcacacctctgacattcaccaaggtctctgagggtcaagcagacatcatgatatcttttgtcaggggagatcatcgggacaactctccttttgatggacctggaggaaatcttgctcatgcttttcaaccaggcccaggtattggaggggatgctcattttgatgaagatgaaaggtggaccaacaatttcagagagtacaacttacatcgtgttgcggctcatgaactcggccattctcttggactctcccattctactgatatcggggctttgatgtaccctagctacaccttcagtggtgatgttcagctagctcaggatgacattgatggcatccaagccatatatggacgttcccaaaatcctgtccagcccatcggcccacaaaccccaaaagcgtgtgacagtaagctaacctttgatgctataactacgattcggggagaagtgatgttctttaaagacagattctacatgcgcacaaatcccttctacccggaagttgagctcaatttcatttctgttttctggccacaactgccaaatgggcttgaagctgcttacgaatttgccgacagagatgaagtccggtttttcaaagggaataagtactgggctgttcagggacagaatgtgctacacggataccccaaggacatctacagctcctttggcttccctagaactgtgaagcatatcgatgctgctctttctgaggaaaacactggaaaaacctacttctttgttgctaacaaatactggaggtatgatgaatataaacgatctatggatccaagttatcccaaaatgatagcacatgactttcctggaattggccacaaagttgatgcagttttcatgaaagatggatttttctatttctttcatggaacaagacaatacaaatttgatcctaaaacgaagagaattttgactctccagaaagctaatagctggttcaactgcaggaaaaattgaacattactaatttgaatggaaaacacatggtgtgagtccaaagaaggtgttttcctgaagaactgtctattttctcagtcatttttaacctctagagtcactgatacacagaatataatcttatttatacctcagtttgcatatttttttactatttagaatgtagccctttttgtactgatataatttagttccacaaatggtgggtacaaaaagtcaagtttgtggcttatggattcatataggccagagttgcaaagatcttttccagagtatgcaactctgacgttgatcccagagagcagcttcagtgacaaacatatcctttcaagacagaaagagacaggagacatgagtctttgccggaggaaaagcagctcaagaacacatgtgcagtcactggtgtcaccctagataggcaagggataactcttctaacacaaaataagtgttttatgtttggaataaagtcaaccttgtttctactgtttt

SEQ ID NO: 1034 - DNA, 634 bp, Homo sapiens
  Genbank Accession No. M13755
cggctgagaggcagcgaactcatctttgccagtacaggagcttgtgccgtggcccacagcccacagcccacagccatgggctgggacctgacggtgaagatgctggcgggcaacgaattccaggtgtccctgagcagctccatgtcggtgtcagagctgaaggcgcagatcacccagaagattggcgtgcacgccttccagcagcgtctggctgtccacccgagcggtgtggcgctgcaggacagggtcccccttgccagccagggcctgggccctggcagcacggtcctgctggtggtggacaaatgcgacgaacctctgagcatcctggtgaggaataacaagggccgcagcagcacctacgaggtccggctgacgcagaccgtggcccacctgaagcagcaagtgagcgggctggagggtgtgcaggacgacctgttctggctgaccttcgaggggaagcccctggaggaccagctcccgctgggggagtacggcctcaagcccctgagcaccgtgttcatgaatctgcgcctgcggggaggcggcacagagcctggcgggcggagctaagggcctccaccagcatccgagcaggatcaagggccggaaataaaggctgttgtaagagaat

SEQ ID NO: 1035 - DNA, 3309 bp, Homo sapiens
  Genbank Accession No. M15036
ctgcagggggggggggggggggggggggggggggggggcgcagcacggctcagaccgaggcgcacaggctcgcagctccgggcgcctagcgcccggtccccgccgcgacgcgccaccgtccctgccggcgcctccgcgccttcgaaatgagggtcctgggtgggcgctgcggggcgccgctggcgtgtctcctcctagtgcttcccgtctcagaggcaaaccttctgtcaaagcaacaggcttcacaagtcctggttaggaagcgtcgtgcaaattctttacttgaagaaaccaaacagggtaatcttgaaagagaatgcatcgaagaactgtgcaataaagaagaagccagggaggtctttgaaaatgacccggaaacggattatttttatccaaaatacttagtttgtcttcgctcttttcaaactgggttattcactgctgcacgtcagtcaactaatgcttatcctgacctaagaagctgtgtcaatgccattccagaccagtgtagtcctctgccatgcaatgaagatggatatatgagctgcaaagatggaaaagcttcttttacttgcacttgtaaaccaggttggcaaggagaaaagtgtgaatttgacataaatgaatgcaaagatccctcaaatataaatggaggttgcagtcaaatttgtgataatacacctggaagttaccactgttcctgtaaaaatggttttgttatgctttcaaataagaaagattgtaaagatgtggatgaatgctctttgaagccaagcatttgtggcacagctgtgtgcaagaacatcccaggagattttgaatgtgaatgccccgaaggctacagatataatctcaaatcaaagtcttgtgaagatatagatgaatgctctgagaacatgtgtgctcagctttgtgtcaattaccctggaggttacacttgctattgtgatgggaagaaaggattcaaacttgcccaagatcagaagagttgtgaggttgtttcagtgtgccttcccttgaaccttgacacaaagtatgaattactttacttggcggagcagtttgcaggggttgttttatatttaaaatttcgtttgccagaaatcagcagattttcagcagaatttgatttccggacatatgattcagaaggcgtgatactgtacgcagaatctatcgatcactcagcgtggctcctgattgcacttcgtggtggaaagattgaagttcagcttaagaatgaacatacatccaaaatcacaactggaggtgatgttattaataatggtctatggaatatggtgtctgtggaagaattagaacatagtattagcattaaaatagctaaagaagctgtgatggatataaataaacctggacccctttttaagccggaaaatggattgctggaaaccaaagtatactttgcaggattccctcggaaagtggaaagtgaactcattaaaccgattaaccctcgtctagatggatgtatacgaagctggaatttgatgaagcaaggagcttctggaataaaggaaattattcaagaaaaacaaaataagcattgcctggttactgtggagaagggctcctactatcctggttctggaattgctcaatttcacatagattataataatgtatccagtgctgagggttggcatgtaaatgtgaccttgaatattcgtccatccacgggcactggtgttatgcttgccttggtttctggtaacaacacagtgccctttgctgtgtccttggtggactccacctctgaaaaatcacaggatattctgttatctgttgaaaatactgtaatatatcggatacaggccctaagtctatgttccgatcaacaatctcatctggaatttagagtcaacagaaacaatctggagttgtcgacaccacttaaaatagaaaccatctcccatgaagaccttcaaagacaacttgccgtcttggacaaagcaatgaaagcaaaagtggccacatacctgggtggccttccagatgttccattcagtgccacaccagtgaatgccttttataatggctgcatggaagtgaatattaatggtgtacagttggatctggatgaagccatttctaaacataatgatattagagctcactcatgtccatcagtttggaaaaagacaaagaattcttaaggcatcttttctctgcttataataccttttccttgtgtgtaattatacttatgtttcaataacagctgaagggttttatttacaatgtgcagtctttgattattttgtggtcctttcctgggatttttaaaaggtcctttgtcaaggaaaaaaattctgttgtgatataaatcacagtaaagaaattcttacttctcttgctatctaagaatagtgaaaaataacaattttaaatttgaatttttttcctacaaatgacagtttcaatttttgtttgtaaaactaaattttaattttatcatcatgaactagtgtctaaatacctatgtttttttcagaaagcaaggaagtaaactcaaacaaaagtgcgtgtaattaaatactattaatcataggcagatactattttgtttatgtttttgtttttttcctgatgaaggcagaagagatggtggtctattaaatatgaattgaatggagggtcctaatgccttatttcaaaacaattcctcagggggaccagctttggcttcatctttctcttgtgtggcttcacatttaaaccagtatctttattgaattagaaaacaagtgggacatattttcctgagagcagcacaggaatcttcttcttggcagctgcagtctgtcaggatgagatatcagattaggttggataggtggggaaatctgaagtgggtacattttttaaattttgctgtgtgggtcacacaaggtctacattacaaaagacagaattcagggatggaaaggagaatgaacaaatgtgggagttcatagttttccttgaatccaacttttaattaccagagtaagttgccaaaatgtgattgttgaagtacaaaaggaactatgaaaaccagaacaaattttaacaaaaggacaaccacagagggatatagtgaatatcgtatcattgtaatcaaagaagtaaggaggtaagattgccacgtgcctgctggtactgtgatgcatttcaagtggcagttttatcacgtttgaatctaccattcatagccagatgtgtatcagatgtttcactgacagtttttaacaataaattcttttcactgtattttatatcacttataataaatcggtgtataatttt

SEQ ID NO: 1036 - DNA, 13500 bp, Homo sapiens
  Genbank Accession No. M15205
  misc_feature (1)..(13500): n = a or c or g or t
aagcttccttcttggaattccaaactaataaatgagctaactccgccccagccccttagtccctccctgcaatccacctacctctgcagacatcttcttccaaggaaccttgcttgggaaacccacaccagacacatccatcatggcgtctacagccgcatgggcgtgcgtccctctgtttatatggccagagccccgcctcgctccgcccctttaaacttggtgggcggaccgaggcggggctcagaccaggccccaccccgatcagccacgtccatcgccctgatttccaggccctcccagtccctgggcgcacgtcccggattcctcccacgagggggcgggctgcggccaaatctcccgccaggtcagcggccgggcgctgattggccccatggcggcggggccggctcgtgattggccagcacgccgtggtttaaagcggtcggcgcgggaccaggggcttactgcgggacggccttggagagtactcgggttcgtgaacttcccggaggcgcaatgagctgcattaacctgcccactgtgctgcccggctcccccagcaagacccgggggcagatccaggtgcgggggccagccctgcgcgtggctggggatgaggtggtcgtggtgatagcctgtgtccaggcatccgcgcagggcgggccctcaaatgacctcaccttctctcctaggtgattctcgggccgatgttctcaggaaaaaggtaatggcttcgcggggctggggtggagctccttcctcttctccggggaccccttgtccctcccctcccctcccctcccctcccctcccctcccctccccttccctccccttcccttccctccccttcccttcccctagaaggaccagcacagcctcctacagctcccgcccggggtgctcctcccttgaattcagtccaggaggaagtctctgccctcttctgcccaggccaagcccctcgtcctgtgtggacgccactccctcctggagctggtgacagctgcttacagcttagctgtcttccccaccaagtcctctgagaaggtggcaaccagttgtgtcccctgtaggccaggcctttttgtacacccctattcaatgtggctgtttccttctaaggccaaggaaacgtagtcgctttctaaaccaaggagtctgaagccgtggagcctctgctctcctgaggtgatagaaccattccctgacccgggtggggctagtgagtttcttgagtaaactacccacgcaccattctttttgttttgtttttgttcttctagaggtaggatcttgctatgttgcccaggctggtctcaaactcctgggctcaagcaattctctcacctcagcctcccaagtagctgggactacaggcgtgcaccccccccgcctccacccagctaattttattttatttttatagagctggggtcttgctatgttgcccaagctggtcttgaactcctggtctcaagcaatcctcctacttcagcatcccaaagtgctgggattacagatgttagccaccatgccctgccccaacattcttttatggccctggggatcacttcagctcaaaccccttgctcaggaagatgtggctcagagttggacttcttggacccagaagcaagtgcttttgacgctgcacacaaagactttctgaaattaatttagaaaagctgtatgccaggtgtggtggcccacgcctttaatcccagcgctttggaaggctgaggtgcgttgatcacttgaggttaggagtttgagaccaccctggtcaacgtggtgaaaccccatctctactgaaaaaaaaaaccaaaaattatctgggcatggtggcagcctcctgtaatcccagctactcgggaggttgaggcaggagaatctcttgaacccggaaggcaggggttgcagtgagctgagatcgctccactgcactctaacctaggcaacagagcgagactccaccccaaaaagaaagaaagaaaaactctgaactctgggaacaactctgggatgaggttactttggaatgcagtcgcaggttccctctacatgtagcctttgcttctgccttccccactacatcttggagaaggttactcctcccacacttcctgggaccacctgagtaccattcctggacctcttccccatagagaattctgacttccaaccctctttgtagggatattataccctgcctgctctgccctgctcttttctggctgtggtgggctcagtctgcataccactagggacaatgaggagccaggcttgttggggaggggtctccttctcccactcctcccgccgtggacctcacctgaccctctctcctcttgcagcacagagttgatgagacgcgtccgtcgcttccagattgctcagtacaagtgcctggtgatcaagtatgccaaagacactcgctacagcagcagcttctgcacacatgaccggtcagtccctgccccctgcagtcctgtccagtggaaaatcacaaggcacaggacacactgttaggactctctttaatggggatggttaatcatttgaacattgaatgattcaaatcagcacactttccaaggtgcttggcaaggtagcgcacactctccactccctgggctggagccagtggttctccactgagggtgattttgccgccagggtccatttgacaatgtttgaagacatttctagttgttgcaactggaggggggaggggatgcttttgggctttaatgtgtagaaatcagggacactgctgctaagggtcctatggtgcagaggacggcccccatgcaagaacgagctggccccaaatgtcaggagcctgccagtgttcagaaactctgccgtagggtttcagcttcacacaggctgcagactggtttggtttggcctgcacgttgatttttgtttaattttttagttgtccgttgttggctggctcccccgtcacctggcagccttcacgcttccctgttttatgtgtagctgtttgagctcgctggacatttccgcctgcaacctcagtttgggagttaaattcacttccttggcagcagatgtgggcccgatgtttctgagcctgagacgctttgcttggtcctctggacttgtccacctgggcacccagtggcaaagccatgctgtgccacacattatagggcttcagcctcagagccctggctgggagctgtatccgagagttgctatggctgtgcagagaacagatccacccggcgtgtggccttcggtgggagctgaggggctcctgaagccagatgctggtggagtggagggtgcttggggcttggagttgcatgtgggaatttaaccgcaccttcgtgaccatgctgtctgatgtaggtcatttacttttccaaatttgcttcctcattcctaagatgcgatgtccacggcacagggtggtgttacacctggtggggacagggaaagcagaggaggtcacttcgttccagctgttggaagtacaacttctggagtcagtcagatccgggattaaatatgagttctgcccgtgtgtcacaagtcatctctaacacgggccacagaggccaaggctgggccagcagcattgatggctcgagaggctgcccttgcaggggccacagctggcctcccacctgccctcactttgtctttctctgtttagggagggaagagggaatttaaaatgcccaaaatactgtttcacacattctttccagaactcgaagtaggattatagcaaggtaataacgaaacaatagttgtaaagtatgtttttttgtttgtttgttgtttgtttttgggacagggtctctctctgtcacccaggctggagtgcagtggctcaatcatagcttactgttacgtgaccccaaacccttgggctcaagtgatcgtcccacctcagccccctgagcaggtgggactacaggcgcacaccaccacacccagttaatttttacatttttttcacacagtgtctcgctgtgttacccaggctggtctcgaactcctgagttcaagtgatcctcccgtcttggcctccccaaagattacgggcatgagctgctgtgtctggccagaatacaggattttaaaaatttatgttttgcaacataattaatataaagacaaatataacccaggcccagttctagttattcattcttctgaattttaaaaggaaacatttggctggcccctaatggtatcatgggccctggtacctgatgaagttggcctagtctgcccccagctcctgaacagtggaagagtttttagtctcattgagctttgtactggacattactaatttctaatccaaagcatcaagtgaagtggcttgtataaataactggttttcctctgggaggctaaggcgggtggatcacttaaaagttaggagtctgagaccagcctggccaacatggtgaaaccccatgtctgctaaaaatacaaaaattagctgggtgtgatggtgtgtggccagtagtcccagctactcttgtggctgaggtgggagaatcgcttgagacccttgagaattgggaggtagagattgcagggagccgagatggcgccactgcactccagcctgggtgacagagcaagactctgtttcataaaaaataaataaataactggttttctggacgagggcctttcccataggtgctaacttctcaaagcccggctgggtgaacactgagcctgctttgcaggtagcaggtggtcacgacagtgccattccctggcccctgcattgtggcttctggcctccctggccctgctcacgctctggctttctcttcccaggaacaccatggaggcgctgcccgcctgcctgctccgagacgtggcccaggaggccctgggcgtggctgtcataggcatcgacgaggggcagtttgtaagttggcttgtcttggcatcactcttcctgccttccgctgtgtcctcccgttttccctcgctgacttggaagttatctganncttttagtaaaataacaaggttaaatagctacaactagtgttggaataccctctgaaggcccctttctagtttccctgtcatagtgtcatagtcttgtaggattcgttttactttttttttttttttttttgagacggagttttgctcttgttgcccaggccggagtacgatggcacaatctcaccgcaaactttgcttcctgggttcaagcaattctctcctgtctcagcctcccgagtagctgggattacaggcatgcgccaccacgcccagctaattttatatttttagtagagatggggtttctccatgttggtcaagctggtctcaaactcccaacctcaggtgatccgccccgccttgaactcccaaagcgctgggattacaggcatgagctaccacacctggccattgtacctttttaaaaatacatatatctatttactggcaagatgcagtgactcacacctgtaatctcagcctgtgggaggccaaggtggacagatcacttgagcccaggagttggagactcacctgggcaacatagtaaaaccccatctctaccaaaaaaaaaaagaaattagccagtcatagcagcgcacacctgtggtccctgctactcaggaggctgaggcagaaggatggagcctgggaggtcgaggctgcagtgagtggtgatagcaccactgcactccagcccgggcgacaaggccagaccctgtctcaaaaaaaaaagggggaggtggggagtaatgtttggtttgcctcatggttccttttgcttgtttcttatacgtttattttcttgttgttgaagtaccttttttagtagtttttgcagccaggaggtatagatgggaagctgccagtctttgtatggaaatctttcttttgtcatctagtttaagctgggcagcaagaggtaggttgatcttgtgtgggtttgggtttttttttttttttgagacggagtcttactctgtcgcccaggctggagtgcaatggtgtgatctcggctcactgcaacctctgccacccggattcaagcgattttcccacctcgcctcccaagtaggtgggattacaggcacccaccatcatgcctggctaatttttgtagagacaagggttcaccatgttggctaggctggtcttgaactcctgacctcaggtgatccacccgccttggcttcccaaagtgttggaattacaggcatgagccgccgtgcccggccttttttatttttattttttttgagatggagtcttgctctgttgccctggctggagtggagtgacgtgatcttagctcacagcaacctccgccttttgggttcaagcagttctgcctcatccttccgggtagctgggatcacaggtgcgtgccacatgcgtamtcatttatgtatttttaatagagatggggtttcaccatgttggccagctggtctggaactcctgacctcaggtgatccgcatgcctcagctcccaaagtgctgggattacaggcgtgaaccacgcctggtcttgatcttgttgctttgaaaagtagcagcgctggtcattgtgtttttgctcagaggaaggccgccatctctctaatgttacctctggtcaggtattctatctgttctctctcagcacaatgtgtgtaggggaagctttgtttcatttatcctgctttatagctggtgtgccttttcatttctggggaaggaatgaagccattatcacttcaggtatttctctcctcatccatctctgaggtgttctgggttccatcttccagagtgtgttttgtttcagtgactatttttacatctgctgctctaattcatcatgctccgttttgtttgacaagttactgttgggttatttttaaatttatgctgttccttccattatgttcctgaaaatcttttcttagacttttccagatttttctatttcctcaggaacatattctgtggttgagtttctgggttattttctgttatcttagttttctttcctctgctttggagattttatttttgttagtttatcacaaagaatgaaactgaaactctctccaaggggtttagcagacttgacctcttaggtacttttagggttgcctcgaagtacacaatgtggtggtttgatataaacataacaggaatttatttctcgctcacagaccccctacgtggttccaggccggttgatggggaggccgcccacgaggcggcttaggtcgccctggctggctgtatacagacacggaggggaagagacgtggcggagcccctgggtgtgaggttttcatgggcctgaccagaagctgcaaacgtcacttctgctgatctttcaaagactagaacctgggcacagggccacctatacgtttagtatacttagtccagttcgttttttgtttgtttttaaaaacagtcttgctctgtggcccaggctggagtgcagtggcgcagtctcggctcactataacctccatgtcccaggttcaagtgattctcccgcctcagcctcctgagtagctgggattacaggcttctgccaccatgcccagctaaccttttgtatttttagtagagacggggtttcatcatgttgaccgggctggtctggaactcctaacctcaggtgatctgcctgcctcagcctcccaaagtgctgggattacagcgtgagccaccacgcctggccacacttagtctagttctataccctggaggaagaataaatgagtttgtttggtgagtgcttcaaggtctctacccgccctgcctcccagcacagagccaggccgctctggcctgaataccctgcccggacgtcacagggcctgtcccctcaaaaggccagtcctgccttcctggttctgttcttgcccaacattctgtatgagtcacagctgcaaattccattcccgtggggaggctgacgggtcccttcccctgtgcggggcatctgccctgtggagttgaggctgccagtgtccgctctgggttcccgaccacccggcagctggcatctcctccccgcttgggtatggccattccgtttctgaccttcagaggtgcgcccctgagcacccccatgcctctgcgtacgtggagacgtcgttgttgctgccccgtgcttgagggactcctggcgagaaagtgagcccaggctgggaatagggctgcagctgttctcttttgctcccaaactgtggcctcagaatgcatccagggattttgcatcagctttggggacatggccctctcagaacaaggaagcttcagctttggcaaggctctccctccttcagacctgccgctgtgagttgttcaatagctctgttctcctggctctgcgtaaaccttgttgacagaggctgacccagacccccgaggcagaaacctttcccttctccttcctcgacatccaaatgccctgagtcaggagccagcgtatgaagtcctgtcccctgttcagcctgtaggagggatttctcggtctacttcctccctggccagcaagtaaaacttgagttcattcagtgagtatttattacaccctacccagacatcagcattctgccctggcctctgtgtgcccttgttctcttcaagaagttccgggtcaccagcctgaccaacatggagaaactccgtctctactaaaaatacaaaaattagccgggcgtggtggcgcactgcctgtaatcccagctacttgggaggctgaggcaggagaatcgcttgaacccggtaggcgaaggttgcagtgagccaagatcgccccattgcactccaagcctgggcaacaacaagagcaaaactcagtctcaaaacaaaacaaaacaaaagaagttcagggtcttcccattgcaagcagttctagatcgaggagaggggttcctagcatgggacccagcagaaggactgtccttcgctccttcattgtctacgtggacagtggatgaagctcagccgaacctgccttgttcccgttttctgggtcagcagggaaagcctttcacagagtagccaccgtgccatcctgaggaaggccctgggtcagaagcttctgtgcttctttgtaccccgggcaagacacacaggtgctcacactgctctgtagaaactgttggcatccaagagagactcacctggaaatctctggaaaacctgaagctcctagctgggggtgctgtgcttcagatgctggtggtgggtgggcacccttgcatcaacagctgcacagtgtgtggtgggcttgcagggtcgcttggcaatagtaggagctctgatttatttttttaaactttttttctggctgggcaggtggctcacacctgtaatcccagcactttggaaggcctaggcgggcggatcacttgaggtcaggagtttgagaccagccaggccaacatggtgaaaccccatctctactaaaaatacaaaaattagccaagcgtggtggcacacacctgtaattccagctacttgggaggcagaggcacaagaattgcttgaacctgggaggcagaggttgcagtgagccaagattatgccactgcactccagcctggatgacagagcgagactctgtctcaaaaaaaatagacaaagccaggcgcagtggctcatgcctgtaatcccaacactttgggaggccgaggtgggtgaatcacgaggtcaggagatcgagaccatcctggctaacacggtgaaaccccgtctctactgaaaatacaaaaaaattagccaggcgtggtggtgggcacctgtagtctcagctactcgggaggctgaggcaggagagtggcgtgaacccaggaggcggagcttgcagtgagctgagatcacgccactgcactccagcctgggcgacagagcgagactccgtctcaaaaaaaaaaaaaaaatagacctttttgtgttttctgttctactacacaagtaatacaggttgagtattccttaacctaaatgcctgggaccagaagtgtttcggatttcaggttttcgaatatttgcatgttcataatataatgagaccttgggaatgagccccaagtgtaaacacaaaatccatttatgttttatagacatcttaggcacatagcctgagagtaattttatgtatttagtaatttgggcgtgagccacagtttttgactgtgacctgtcccatgaggtcaggtgtggaattttccacttgtggtgggcgctcaaaaagtttcagattttggagcctttcaggttagagacatgcaatctataataagtttaatctaggaaaagttagggtctggcacagaggctcacgtctgtgatcccagcactttgggaggctgaggcaggcagatcactggaagtgctggacgggtggggaagtgccgggtgcaagaaccaagctctttgactatggacctcagcctgaggttggtcaagaggtggagtgagtgggggctgaggaccttcatcctgaaaccctgatgcaggagagtctggggtctgccttctaccctcatgtggcgggtgaaggagcaaggttctcaactcaggagggttcttcccctctccattcccacccaggggacatctcacaacaactagaaacaattttgtcgcagctggggggtgggaggtgtgttcctggcatctatctaatgggtgggggcgagggacgcagcccaacaccctacagtgcacaggacacagcgagatccggcctcaaactggcagccatggcagcgtcagccctccagggggcgcgccctggcgcaggtggtgtgccggcccacagctccttgcaggctgggagctgcattttcgtgacatgtcatgagtcctcagagaaaaagagggaacgagtgcatggtggggaggggccctggcgtgctggagtctctgggtttccttctccagagacccctgcagtcagctgagcgcaatcagtcacgttgggctttgcttggatctcactggaatttttcgagccaccccttagtcctcaccttgctaagccctcacgtctcaataacctcaaacctcagtacctgggctgagaaagcctgagtggccctgggagagagaccctgcacccaaggacaaggacatccctgcttcacccaacccaaaggccagtctggacatatgaactcaaccagctaagagtgatatgattgattgatgagaatcaccagagcacttgccagagtttcagcttctccctgggccaaagtgaagtttgctttacacagtaaatgtgctctgtgcaggtcctgaatttagaaggctgtgctgtgtcatcctgctctgtaaatggccagtaggacccccgccccttctcaaggcacattacccgtttaaaacgggggaggcaagagcacaaagcgcccacctattcaccgaagagcatgtatataacttagggccttccatccttaaacaacaggaccttccttgctcttacggaaaaggaaacaggttcagagacgttaattcattgccaaggtcacacagataatgggtccagcgaagagtggtgtccgagcccaaggcagcaggcctttggccactgcagtgttaaacagcacagctggtgtggaagtccggtgctgagtcctgggtacctggactcggagggaagctggctgcagggggaaggggctgcgcagttgtggatgtacctgtcgtctgctggggggcgtgcgggtggacacagtcccccggcctggggagcctcgtgggagaattaagagttactccgggccaaatggccggagttgtcagatctggcagcgtcttcgctggggctccagggagctgctgctggggtggaagctctcacactctttctccacgtgccctttccagttccctgacatcatggagttctgcgaggccatggccaacgccgggaagaccgtaattgtggctgcactggatgggaccttccagaggaaggtaaggcgtctgatccaggtctggagctgggattgaggagggcaagaggcttctggatgggcacagagacaccagctctgggtgaccagggctcagccaccacagggttacggccgagctgctcaggcttggctgagccaagggactccatggtctgtgcagactgcgtgccatctgttgtggcaggtgctttgaattggcaaagggacagagccgggcatggtgctctgggggttgggggaaggactaaggtcagagcaaactctcctggcttcagtacttgtgaatcagagggtttaaaagaaaaacccacctggtaaggtgctgagcgccctctgtctttccatgggagcacagccatttggggccatcctgaacctggtgccgctggccgagagcgtggtgaagctgacggcggtgtgcatggagtgcttccgggaagccgcctataccaagaggctcggcacagagaaggaggtagctccacctgccttccctgcaggccggcggggtgggggtatggctctgcctccttcctgtcctggcccttcacccatcccctgtccctgcggccaggtcgaggtgattgggggagcagacaagtaccactccgtgtgtcggctctgctacttcaagaaggcctcaggccagcctgccgggccggacaacaaagagaactgcccagtgccaggaaagccaggggaagccgtggctgccaggaagctctttgccccacagcagattctgcaatgcagccctgccaactgagggacctgcaagggccgcccgctcccttcctgccactgccgcctactggacgctgccctgcatgctgcccagccactccaggaggaagtcgggaggcgtggagggtgaccacaccttggccttctgggaactctcctttgtgtggctgccccacctgccgcatgctccctcctctcctacccactggtctgcttaaagcttccctctcagctgctgggacgatcgcccaggctggagctggccccgcttggtggcctgggatctggcacactccctctccttggggtgagggacagagccccacgctgttgacatcagcctgcttcttcccctctgcggctttcactgctgagtttctgttctccctgggaagcctgtgccagcacctttgagccttggcccacactgaggcttaggcctctctgcctgggatgggctcccaccctcccctgaggatggcctggattcacgccctcttgtttccttttgggctcaaagcccttcctacctctggtgatggtttccacaggaacaacagcatctttcaccaagatgggtggcaccaaccttgctgggacttggatcccaggggcttatctcttcaagtgtggagagggcagggtccacgcctctgctgtagcttatgaaattaactaattgaaaattcactggttggtggacgcacatttctctttcacctgggtttccctgggtctcatggacagctccaacttgatttggg

SEQ ID NO: 1037 - DNA, 3549 bp, Homo sapiens
  Genbank Accession No. M15856
cccctcttcctcctcctcaagggaaagctgcccacttctagctgccctgccatcccctttaaagggcgacttgctcagcgccaaaccgcggctccagccctctccagcctccggctcagccggctcatcagtcggtccgcgccttgcagctcctccagagggacgcgccccgagatggagagcaaagccctgctcgtgctgactctggccgtgtggctccagagtctgaccgcctcccgcggaggggtggccgccgccgaccaaagaagagattttatcgacatcgaaagtaaatttgccctaaggacccctgaagacacagctgaggacacttgccacctcattcccggagtagcagagtccgtggctacctgtcatttcaatcacagcagcaaaaccttcatggtgatccatggctggacggtaacaggaatgtatgagagttgggtgccaaaacttgtggccgccctgtacaagagagaaccagactccaatgtcattgtggtggactggctgtcacgggctcaggagcattacccagtgtccgcgggctacaccaaactggtgggacaggatgtggcccggtttatcaactggatggaggaggagtttaactaccctctggacaatgtccatctcttgggatacagccttggagcccatgctgctggcattgcaggaagtctgaccaataagaaagtcaacagaattactggcctcgatccagctggacctaactttgagtatgcagaagccccgagtcgtctttctcctgatgatgcagattttgtagacgtcttacacacattcaccagagggtcccctggtcgaagcattggaatccagaaaccagttgggcatgttgacatttacccgaatggaggtacttttcagccaggatgtaacattggagaagctatccgcgtgattgcagagagaggacttggagatgtggaccagctagtgaagtgctcccacgagcgctccattcatctcttcatcgactctctgttgaatgaagaaaatccaagtaaggcctacaggtgcagttccaaggaagcctttgagaaagggctctgcttgagttgtagaaagaaccgctgcaacaatctgggctatgagatcaataaagtcagagccaaaagaagcagcaaaatgtacctgaagactcgttctcagatgccctacaaagtcttccattaccaagtaaagattcatttttctgggactgagagtgaaacccataccaatcaggcctttgagatttctctgtatggcaccgtggccgagagtgagaacatcccattcactctgcctgaagtttccacaaataagacctactccttcctaatttacacagaggtagatattggagaactactcatgttgaagctcaaatggaagagtgattcatactttagctggtcagactggtggagcagtcccggcttcgccattcagaagatcagagtaaaagcaggagagactcagaaaaaggtgatcttctgttctagggagaaagtgtctcatttgcagaaaggaaaggcacctgcggtatttgtgaaatgccatgacaagtctctgaataagaagtcaggctgaaactgggcgaatctacagaacaaagaacggcatgtgaattctgtgaagaatgaagtggaggaagtaacttttacaaaacatacccagtgtttggggtgtttcaaaagtggattttcctgaatattaatcccagccctacccttgttagttattttaggagacagtctcaagcactaaaaagtggctaattcaatttatggggtatagtggccaaatagcacatcctccaacgttaaaagacagtggatcatgaaaagtgctgttttgtcctttgagaaagaaataattgtttgagcgcagagtaaaataaggctccttcatgtggcgtattgggccatagcctataattggttagaacctcctattttaattggaattctggatctttcggactgaggccttctcaaactttactctaagtctccaagaatacagaaaatgcttttccgcggcacgaatcagactcatctacacagcagtatgaatgatgttttagaatgattccctcttgctattggaatgtggtccagacgtcaaccaggaacatgtaacttggagagggacgaagaaagggtctgataaacacagaggttttaaacagtccctaccattggcctgcatcatgacaaagttacaaattcaaggagatataaaatctagatcaattaattcttaataggctttatcgtttattgcttaatccctctctcccccttcttttttgtctcaagattatattataataatgttctctgggtaggtgttgaaaatgagcctgtaatcctcagctgacacataatttgaatggtgcagaaaaaaaaaagataccgtaattttattattagattctccaaatgattttcatcaatttaaaatcattcaatatctgacagttactcttcagttttaggcttaccttggtcatgcttcagttgtacttccagtgcgtctcttttgttcctggctttgacatgaaaagataggtttgagttcaaattttgcattgtgtgagcttctacagattttagacaaggaccgtttttactaagtaaaagggtggagaggttcctggggtggattcctaagcagtgcttgtaaaccatcgcgtgcaatgagccagatggagtaccatgagggttgttatttgttgtttttaacaactaatcaagagtgagtgaacaactatttataaactagatctcctatttttcagaatgctcttctacgtataaatatgaaatgataaagatgtcaaatatctcagaggctatagctgggaacccgactgtgaaagtatgtgatatctgaacacatactagaaagctctgcatgtgtgttgtccttcagcataattcggaagggaaaacagtcgatcaagggatgtattggaacatgtcggagtagaaattgttcctgatgtgccagaacttcgaccctttctctgagagagatgatcgtgcctataaatagtaggaccaatgttgtgattaacatcatcaggcttggaatgaattctctctaaaaataaaatgatgtatgatttgttgttggcatcccctttattaattcattaaatttctggatttgggttgtgacccagggtgcattaacttaaaagattcactaaagcagcacatagcactgggaactctggctccgaaaaactttgttatatatatcaaggatgttctggctttacattttatttattagctgtaaatacatgtgtggatgtgtaaatggagcttgtacatattggaaaggtcattgtggctatctgcatttataaatgtgtggtgctaactgtatgtgtctttatcagtgatggtctcacagagccaactcactcttatgaaatgggctttaacaaaacaagaaagaaacgtacttaactgtgtgaagaaatggaatcagcttttaataaaattgacaacattttattaccac

SEQ ID NO: 1038 - DNA, 13957 bp, Homo sapiens
  Genbank Accession No. M18533
gggattccctcactttccccctacaggactcagatctgggaggcaattaccttcggagaaaaacgaataggaaaaactgaagtgttactttttttaaagctgctgaagtttgttggtttctcattgtttttaagcctactggagcaataaagtttgaagaacttttaccaggttttttttatcgctgccttgatatacacttttcaaaatgctttggtgggaagaagtagaggactgttatgaaagagaagatgttcaaaagaaaacattcacaaaatgggtaaatgcacaattttctaagtttgggaagcagcatattgagaacctcttcagtgacctacaggatgggaggcgcctcctagacctcctcgaaggcctgacagggcaaaaactgccaaaagaaaaaggatccacaagagttcatgccctgaacaatgtcaacaaggcactgcgggttttgcagaacaataatgttgatttagtgaatattggaagtactgacatcgtagatggaaatcataaactgactcttggtttgatttggaatataatcctccactggcaggtcaaaaatgtaatgaaaaatatcatggctggattgcaacaaaccaacagtgaaaagattctcctgagctgggtccgacaatcaactcgtaattatccacaggttaatgtaatcaacttcaccaccagctggtctgatggcctggctttgaatgctctcatccatagtcataggccagacctatttgactggaatagtgtggtttgccagcagtcagccacacaacgactggaacatgcattcaacatcgccagatatcaattaggcatagagaaactactcgatcctgaagatgttgataccacctatccagataagaagtccatcttaatgtacatcacatcactcttccaagttttgcctcaacaagtgagcattgaagccatccaggaagtggaaatgttgccaaggccacctaaagtgactaaagaagaacattttcagttacatcatcaaatgcactattctcaacagatcacggtcagtctagcacagggatatgagagaacttcttcccctaagcctcgattcaagagctatgcctacacacaggctgcttatgtcaccacctctgaccctacacggagcccatttccttcacagcatttggaagctcctgaagacaagtcatttggcagttcattgatggagagtgaagtaaacctggaccgttatcaaacagctttagaagaagtattatcgtggcttctttctgctgaggacacattgcaagcacaaggagagatttctaatgatgtggaagtggtgaaagaccagtttcatactcatgaggggtacatgatggatttgacagcccatcagggccgggttggtaatattctacaattgggaagtaagctgattggaacaggaaaattatcagaagatgaagaaactgaagtacaagagcagatgaatctcctaaattcaagatgggaatgcctcagggtagctagcatggaaaaacaaagcaatttacatagagttttaatggatctccagaatcagaaactgaaagagttgaatgactggctaacaaaaacagaagaaagaacaaggaaaatggaggaagagcctcttggacctgatcttgaagacctaaaacgccaagtacaacaacataaggtgcttcaagaagatctagaacaagaacaagtcagggtcaattctctcactcacatggtggtggtagttgatgaatctagtggagatcacgcaactgctgctttggaagaacaacttaaggtattgggagatcgatgggcaaacatctgtagatggacagaagaccgctgggttcttttacaagacatccttctcaaatggcaacgtcttactgaagaacagtgcctttttagtgcatggctttcagaaaaagaagatgcagtgaacaagattcacacaactggctttaaagatcaaaatgaaatgttatcaagtcttcaaaaactggccgttttaaaagcggatctagaaaagaaaaagcaatccatgggcaaactgtattcactcaaacaagatcttctttcaacactgaagaataagtcagtgacccagaagacggaagcatggctggataactttgcccggtgttgggataatttagtccaaaaacttgaaaagagtacagcacagatttcacaggctgtcaccaccactcagccatcactaacacagacaactgtaatggaaacagtaactacggtgaccacaagggaacagatcctggtaaagcatgctcaagaggaacttccaccaccacctccccaaaagaagaggcagattactgtggattctgaaattaggaaaaggttggatgttgatataactgaacttcacagctggattactcgctcagaagctgtgttgcagagtcctgaatttgcaatctttcggaaggaaggcaacttctcagacttaaaagaaaaagtcaatgccatagagcgagaaaaagctgagaagttcagaaaactgcaagatgccagcagatcagctcaggccctggtggaacagatggtgaatgagggtgttaatgcagatagcatcaaacaagcctcagaacaactgaacagccggtggatcgaattctgccagttgctaagtgagagacttaactggctggagtatcagaacaacatcatcgctttctataatcagctacaacaattggagcagatgacaactactgctgaaaactggttgaaaatccaacccaccaccccatcagagccaacagcaattaaaagtcagttaaaaatttgtaaggatgaagtcaaccggctatcaggtcttcaacctcaaattgaacgattaaaaattcaaagcatagccctgaaagagaaaggacaaggacccatgttcctggatgcagactttgtggcctttacaaatcattttaagcaagtcttttctgatgtgcaggccagagagaaagagctacagacaatttttgacactttgccaccaatgcgctatcaggagaccatgagtgccatcaggacatgggtccagcagtcagaaaccaaactctccatacctcaacttagtgtcaccgactatgaaatcatggagcagagactcggggaattgcaggctttacaaagttctctgcaagagcaacaaagtggcctatactatctcagcaccactgtgaaagagatgtcgaagaaagcgccctctgaaattagccggaaatatcaatcagaatttgaagaaattgagggacgctggaagaagctctcctcccagctggttgagcattgtcaaaagctagaggagcaaatgaataaactccgaaaaattcagaatcacatacaaaccctgaagaaatggatggctgaagttgatgtttttctgaaggaggaatggcctgcccttggggattcagaaattctaaaaaagcagctgaaacagtgcagacttttagtcagtgatattcagacaattcagcccagtctaaacagtgtcaatgaaggtgggcagaagataaagaatgaagcagagccagagtttgcttcgagacttgagacagaactcaaagaacttaacactcagtgggatcacatgtgccaacaggtctatgccagaaaggaggccttgaagggaggtttggagaaaactgtaagcctccagaaagatctatcagagatgcacgaatggatgacacaagctgaagaagagtatcttgagagagattttgaatataaaactccagatgaattacagaaagcagttgaagagatgaagagagctaaagaagaggcccaacaaaaagaagcgaaagtgaaactccttactgagtctgtaaatagtgtcatagctcaagctccacctgtagcacaagaggccttaaaaaaggaacttgaaactctaaccaccaactaccagtggctctgcactaggctgaatgggaaatgcaagactttggaagaagtttgggcatgttggcatgagttattgtcatacttggagaaagcaaacaagtggctaaatgaagtagaatttaaacttaaaaccactgaaaacattcctggcggagctgaggaaatctctgaggtgctagattcacttgaaaatttgatgcgacattcagaggataacccaaatcagattcgcatattggcacagaccctaacagatggcggagtcatggatgagctaatcaatgaggaacttgagacatttaattctcgttggagggaactacatgaagaggctgtaaggaggcaaaagttgcttgaacagagcatccagtctgcccaggagactgaaaaatccttacacttaatccaggagtccctcacattcattgacaagcagttggcagcttatattgcagacaaggtggacgcagctcaaatgcctcaggaagcccagaaaatccaatctgatttgacaagtcatgagatcagtttagaagaaatgaagaaacataatcaggggaaggaggctgcccaaagagtcctgtctcagattgatgttgcacagaaaaaattacaagatgtctccatgaagtttcgattattccagaaaccagccaattttgagctgcgtctacaagaaagtaagatgattttagatgaagtgaagatgcacttgcctgcattggaaacaaagagtgtggaacaggaagtagtacagtcacagctaaatcattgtgtgaacttgtataaaagtctgagtgaagtgaagtctgaagtggaaatggtgataaagactggacgtcagattgtacagaaaaagcagacggaaaatcccaaagaacttgatgaaagagtaacagctttgaaattgcattataatgagctgggagcaaaggtaacagaaagaaagcaacagttggagaaatgcttgaaattgtcccgtaagatgcgaaaggaaatgaatgtcttgacagaatggctggcagctacagatatggaattgacaaagagatcagcagttgaaggaatgcctagtaatttggattctgaagttgcctggggaaaggctactcaaaaagagattgagaaacagaaggtgcacctgaagagtatcacagaggtaggagaggccttgaaaacagttttgggcaagaaggagacgttggtggaagataaactcagtcttctgaatagtaactggatagctgtcacctcccgagcagaagagtggttaaatcttttgttggaataccagaaacacatggaaacttttgaccagaatgtggaccacatcacaaagtggatcattcaggctgacacacttttggatgaatcagagaaaaagaaaccccagcaaaaagaagacgtgcttaagcgtttaaaggcagaactgaatgacatacgcccaaaggtggactctacacgtgaccaagcagcaaacttgatggcaaaccgcggtgaccactgcaggaaattagtagagccccaaatctcagagctcaaccatcgatttgcagccatttcacacagaattaagactggaaaggcctccattcctttgaaggaattggagcagtttaactcagatatacaaaaattgcttgaaccactggaggctgaaattcagcagggggtgaatctgaaagaggaagacttcaataaagatatgaatgaagacaatgagggtactgtaaaagaattgttgcaaagaggagacaacttacaacaaagaatcacagatgagagaaagagagaggaaataaagataaaacagcagctgttacagacaaaacataatgctctcaaggatttgaggtctcaaagaagaaaaaaggctctagaaatttctcatcagtggtatcagtacaagaggcaggctgatgatctcctgaaatgcttggatgacattgaaaaaaaattagccagcctacctgagcccagagatgaaaggaaaataaaggaaattgatcgggaattgcagaagaagaaagaggagctgaatgcagtgcgtaggcaagctgagggcttgtctgaggatggggccgcaatggcagtggagccaactcagatccagctcagcaagcgctggcgggaaattgagagcaaatttgctcagtttcgaagactcaactttgcacaaattcacactgtccgtgaagaaacgatgatggtgatgactgaagacatgcctttggaaatttcttatgtgccttctacttatttgactgaaatcactcatgtctcacaagccctattagaagtggaacaacttctcaatgctcctgacctctgtgctaaggactttgaagatctctttaagcaagaggagtctctgaagaatataaaagatagtctacaacaaagctcaggtcggattgacattattcatagcaagaagacagcagcattgcaaagtgcaacgcctgtggaaagggtgaagctacaggaagctctctcccagcttgatttccaatgggaaaaagttaacaaaatgtacaaggaccgacaagggcgatttgacagatctgttgagaaatggcggcgttttcattatgatataaagatatttaatcagtggctaacagaagctgaacagtttctcagaaagacacaaattcctgagaattgggaacatgctaaatacaaatggtatcttaaggaactccaggatggcattgggcagcggcaaactgttgtcagaacattgaatgcaactggggaagaaataattcagcaatcctcaaaaacagatgccagtattctacaggaaaaattgggaagcctgaatctgcggtggcaggaggtctgcaaacagctgtcagacagaaaaaagaggctagaagaacaaaagaatatcttgtcagaatttcaaagagatttaaatgaatttgttttatggttggaggaagcagataacattgctagtatcccacttgaacctggaaaagagcagcaactaaaagaaaagcttgagcaagtcaagttactggtggaagagttgcccctgcgccagggaattctcaaacaattaaatgaaactggaggacccgtgcttgtaagtgctcccataagcccagaagagcaagataaacttgaaaataagctcaagcagacaaatctccagtggataaaggtttccagagctttacctgagaaacaaggagaaattgaagctcaaataaaagaccttgggcagcttgaaaaaaagcttgaagaccttgaagagcagttaaatcatctgctgctgtggttatctcctattaggaatcagttggaaatttataaccaaccaaaccaagaaggaccatttgacgttcaggaaactgaaatagcagttcaagctaaacaaccggatgtggaagagattttgtctaaagggcagcatttgtacaaggaaaaaccagccactcagccagtgaagaggaagttagaagatctgagctctgagtggaaggcggtaaaccgtttacttcaagagctgagggcaaagcagcctgacctagctcctggactgaccactattggagcctctcctactcagactgttactctggtgacacaacctgtggttactaaggaaactgccatctccaaactagaaatgccatcttccttgatgttggaggtacctgctctggcagatttcaaccgggcttggacagaacttaccgactggctttctctgcttgatcaagttataaaatcacagagggtgatggtgggtgaccttgaggatatcaacgagatgatcatcaagcagaaggcaacaatgcaggatttggaacagaggcgtccccagttggaagaactcattaccgctgcccaaaatttgaaaaacaagaccagcaatcaagaggctagaacaatcattacggatcgaattgaaagaattcagaatcagtgggatgaagtacaagaacaccttcagaaccggaggcaacagttgaatgaaatgttaaaggattcaacacaatggctggaagctaaggaagaagctgagcaggtcttaggacaggccagagccaagcttgagtcatggaaggagggtccctatacagtagatgcaatccaaaagaaaatcacagaaaccaagcagttggccaaagacctccgccagtggcagacaaatgtagatgtggcaaatgacttggccctgaaacttctccgggattattctgcagatgataccagaaaagtccacatgataacagagaatatcaatgcctcttggagaagcattcataaaagggtgagtgagcgagaggctgctttggaagaaactcatagattactgcaacagttccccctggacctggaaaagtttcttgcctggcttacagaagctgaaacaactgccaatgtcctacaggatgctacccgtaaggaaaggctcctagaagactccaagggagtaaaagagctgatgaaacaatggcaagacctccaaggtgaaattgaagctcacacagatgtttatcacaacctggatgaaaacagccaaaaaatcctgagatccctggaaggttccgatgatgcagtcctgttacaaagacgtttggataacatgaacttcaagtggagtgaacttcggaaaaagtctctcaacattaggtcccatttggaagccagttctgaccagtggaagcgtctgcacctttctctgcaggaacttctggtgtggctacagctgaaagatgatgaattaagccggcaggcacctattggaggcgactttccagcagttcagaagcagaacgatgtacatagggccttcaagagggaattgaaaactaaagaacctgtaatcatgagtactcttgagactgtacgaatatttctgacagagcagcctttggaaggactagagaaactctaccaggagcccagagagctgcctcctgaggagagagcccagaatgtcactcggcttctacgaaagcaggctgaggaggtcaatactgagtgggaaaaattgaacctgcactccgctgactggcagagaaaaatagatgagacccttgaaagactccaggaacttcaagaggccacggatgagctggacctcaagctgcgccaagctgaggtgatcaagggatcctggcagcccgtgggcgatctcctcattgactctctccaagatcacctcgagaaagtcaaggcacttcgaggagaaattgcgcctctgaaagagaacgtgagccacgtcaatgaccttgctcgccagcttaccactttgggcattcagctctcaccgtataacctcagcactctggaagacctgaacaccagatggaagcttctgcaggtggccgtcgaggaccgagtcaggcagctgcatgaagcccacagggactttggtccagcatctcagcactttctttccacgtctgtccagggtccctgggagagagccatctcgccaaacaaagtgccctactatatcaaccacgagactcaaacaacttgctgggaccatcccaaaatgacagagctctaccagtctttagctgacctgaataatgtcagattctcagcttataggactgccatgaaactccgaagactgcagaaggccctttgcttggatctcttgagcctgtcagctgcatgtgatgccttggaccagcacaacctcaagcaaaatgaccagcccatggatatcctgcagattattaattgtttgaccactatttatgaccgcctggagcaagagcacaacaatttggtcaacgtccctctctgcgtggatatgtgtctgaactggctgctgaatgtttatgatacgggacgaacagggaggatccgtgtcctgtcttttaaaactggcatcatttccctgtgtaaagcacatttggaagacaagtacagataccttttcaagcaagtggcaagttcaacaggattttgtgaccagcgcaggctgggcctccttctgcatgattctatccaaattccaagacagttgggtgaagttgcatcctttgggggcagtaacattgagccaagtgtccggagctgcttccaatttgctaataataagccagagatcgaagcggccctcttcctagactggatgagactggaaccccagtccatggtgtggctgcccgtcctgcacagagtggctgctgcagaaactgccaagcatcaggccaaatgtaacatctgcaaagagtgtccaatcattggattcaggtacaggagtctaaagcactttaattatgacatctgccaaagctgctttttttctggtcgagttgcaaaaggccataaaatgcactatcccatggtggaatattgcactccgactacatcaggagaagatgttcgagactttgccaaggtactaaaaaacaaatttcgaaccaaaaggtattttgcgaagcatccccgaatgggctacctgccagtgcagactgtcttagagggggacaacatggaaactcccgttactctgatcaacttctggccagtagattctgcgcctgcctcgtcccctcagctttcacacgatgatactcattcacgcattgaacattatgctagcaggctagcagaaatggaaaacagcaatggatcttatctaaatgatagcatctctcctaatgagagcatagatgatgaacatttgttaatccagcattactgccaaagtttgaaccaggactcccccctgagccagcctcgtagtcctgcccagatcttgatttccttagagagtgaggaaagaggggagctagagagaatcctagcagatcttgaggaagaaaacaggaatctgcaagcagaatatgaccgtctaaagcagcagcacgaacataaaggcctgtccccactgccgtcccctcctgaaatgatgcccacctctccccagagtccccgggatgctgagctcattgctgaggccaagctactgcgtcaacacaaaggccgcctggaagccaggatgcaaatcctggaagaccacaataaacagctggagtcacagttacacaggctaaggcagctgctggagcaaccccaggcagaggccaaagtgaatggcacaacggtgtcctctccttctacctctctacagaggtccgacagcagtcagcctatgctgctccgagtggttggcagtcaaacttcggactccatgggtgaggaagatcttctcagtcctccccaggacacaagcacagggttagaggaggtgatggagcaactcaacaactccttccctagttcaagaggaagaaatacccctggaaagccaatgagagaggacacaatgtaggaagtcttttccacatggcagatgatttgggcagagcgatggagtccttagtatcagtcatgacagatgaagaaggagcagaataaatgttttacaactcctgattcccgcatggtttttataatattcatacaacaaagaggattagacagtaagagtttacaagaaataaatctatatttttgtgaagggtagtggtattatactgtagatttcagtagtttctaagtctgttattgttttgttaacaatggcaggttttacacgtctatgcaattgtacaaaaaagttataagaaaactacatgtaaaatcttgatagctaaataacttgccatttctttatatggaacgcattttgggttgtttaaaaatttataacagttataaagaaagattgtaaactaaagtgtgctttataaaaaaaagttgtttataaaaacccctaaaaacaaaacaaacacacacacacacacatacacacacacacacaaaactttgaggcagcgcattgttttgcatccttttggcgtgatatccatatgaaattcatggctttttctttttttgcatattaaagataagacttcctctaccaccacaccaaatgactactacacactgctcatttgagaactgtcagctgagtggggcaggcttgagttttcatttcatatatctatatgtctataagtatataaatactatagttatatagataaagagatacgaatttctatagactgactttttccattttttaaatgttcatgtcacatcctaatagaaagaaattacttctagtcagtcatccaggcttacctgcttggtctagaatggatttttcccggagccggaagccaggaggaaactacaccacactaaaacattgtctacagctccagatgtttctcattttaaacaactttccactgacaacgaaagtaaagtaaagtattggatttttttaaagggaacatgtgaatgaatacacaggacttattatatcagagtgagtaatcggttggttggttgattgattgattgattgatacattcagcttcctgctgctagcaatgccacgatttagatttaatgatgcttcagtggaaatcaatcagaaggtattctgaccttgtgaacatcagaaggtattttttaactcccaagcagtagcaggacgatgatagggctggagggctatggattcccagcccatccctgtgaaggagtaggccactctttaagtgaaggattggatgattgttcataatacataaagttctctgtaattacaactaaattattatgccctcttctcacagtcaaaaggaactgggtggtttggtttttgttgcttttttagatttattgtcccatgtgggatgagtttttaaatgccacaagacataatttaaaataaataaactttgggaaaaggtgtaagacagtagccccatcacatttgtgatactgacaggtatcaacccagaagcccatgaactgtgtttccatcctttgcatttctctgcgagtagttccacacaggtttgtaagtaagtaagaaagaaggcaaattgattcaaatgttacaaaaaaacccttcttggtggattagacaggttaaatatataaacaaacaaacaaaaattgctcaaaaaagaggagaaaagctcaagaggaaaagctaaggactggtaggaaaaagctttactctttcatgccattttatttctttttgatttttaaatcattcattcaatagataccaccgtgtgacctataattttgcaaatctgttacctctgacatcaagtgtaattagcttttggagagtgggctgacatcaagtgtaattagcttttggagagtgggttttgtccattattaataattaattaattaacatcaaacacggcttctcatgctatttctacctcactttggttttggggtgttcctgataattgtgcacacctgagttcacagcttcaccacttgtccattgcgttattttctttttcctttataattctttctttttccttcataattttcaaaagaaaacccaaagctctaaggtaacaaattaccaaattacatgaagatttggtttttgtcttgcatttttttcctttatgtgacgctggaccttttctttacccaaggatttttaaaactcagatttaaaacaaggggttactttacatcctactaagaagtttaagtaagtaagtttcattctaaaatcagaggtaaatagagtgcataaataattttgttttaatctttttgtttttcttttagacacattagctctggagtgagtctgtcataatatttgaacaaaaattgagagctttattgctgcattttaagcataattaatttggacattatttcgtgttgtgttctttataaccaccgagtattaaactgtaaatcataatgtaactgaagcataaacatcacatggcatgttttgtcattgttttcaggtactgagttcttacttgagtatcataatatattgtgttttaacaccaacactgtaacatttacgaattatttttttaaacttcagttttactgcattttcacaacatatcagacttcaccaaatatatgccttactattgtattatagtactgctttactgtgtatctcaataaagcacgcagttatgttac

SEQ ID NO: 1039 - DNA, 2529 bp, Homo sapiens
  Genbank Accession No. M21389
gcatcctttttgggctgctcacagcccccagcctctatggtgaagacatacttgctagcagcgtcaccaacttgctgccaagagatcagtgctgcaaggcaaggttatttctaactgagcagagcctgccaggaagaaagcgtttgcaccccacaccactgtgcaggtgtgaccggtgagctcacagctgccccccaggcatgcccagcccacttaatcattcacagctcgacagctctctcgcccagcccagttctggaagggataaaaagggggcatcaccgttcctgggtaacagagccaccttctgcgtcctgctgagctctgttctctccagcacctcccaacccactagtgcctggttctcttgctccaccaggaacaagccaccatgtctcgccagtcaagtgtgtccttccggagcgggggcagtcgtagcttcagcaccgcctctgccatcaccccgtctgtctcccgcaccagcttcacctccgtgtcccggtccgggggtggcggtggtggtggcttcggcagggtcagccttgcgggtgcttgtggagtgggtggctatggcagccggagcctctacaacctggggggctccaagaggatatccatcagcactagaggaggcagcttcaggaaccggtttggtgctggtgctggaggcggctatggctttggaggtggtgccggtagtggatttggtttcggcggtggagctggtggtggctttgggctcggtggcggagctggctttggaggtggcttcggtggccctggctttcctgtctgccctcctggaggtatccaagaggtcactgtcaaccagagtctcctgactcccctcaacctgcaaatcgaccccagcatccagagggtgaggaccgaggagcgcgagcagatcaagaccctcaacaataagtttgcctccttcatcgacaaggtgcggttcctggagcagcagaacaaggttctggacaccaagtggaccctgctgcaggagcagggcaccaagactgtgaggcagaacctggagccgttgttcgagcagtacatcaacaacctcaggaggcagctggacagcatcgtgggggaacggggccgcctggactcagagctgagaaacatgcaggacctggtggaagacttcaagaacaagtatgaggatgaaatcaacaagcgtaccactgctgagaatgagtttgtgatgctgaagaaggatgtagatgctgcctacatgaacaaggtggagctggaggccaaggttgatgcactgatggatgagattaacttcatgaagatgttctttgatgcggagctgtcccagatgcagacgcatgtctctgacacctcagtggtcctctccatggacaacaaccgcaacctggacctggatagcatcatcgctgaggtcaaggcccagtatgaggagattgccaaccgcagccggacagaagccgagtcctggtatcagaccaagtatgaggagctgcagcagacagctggccggcatggcgatgacctccgcaacaccaagcatgagatcacagagatgaaccggatgatccagaggctgagagccgagattgacaatgtcaagaaacagtgcgccaatctgcagaacgccattgcggatgccgagcagcgtggggagctggccctcaaggatgccaggaacaagctggccgagctggaggaggccctgcagaaggccaagcaggacatggcccggctgctgcgtgagtaccaggagctcatgaacaccaagctggccctggacgtggagatcgccacttaccgcaagctgctggagggcgaggaatgcagactcagtggagaaggagttggaccagtcaacatctctgttgtcacaagcagtgtttcctctggatatggcagtggcagtggctatggcggtggcctcggtggaggtcttggcggcggcctcggtggaggtcttgccggaggtagcagtggaagctactactccagcagcagtgggggtgtcggcctaggtggtgggctcagtgtggggggctctggcttcagtgcaagcagtggccgagggctgggggtgggctttggcagtggcgggggtagcagctccagcgtcaaatttgtctccaccacctcctcctcccggaagagcttcaagagctaagaacctgctgcaagtcactgccttccaagtgcagcaacccagcccatggagattgcctcttctaggcagttgctcaagccatgttttatccttttctggagagtagtctagaccaagccaattgcagaaccacattctttggttcccaggagagccccattcccagcccctggtctcccgtgccgcagttctatattctgcttcaaatcagccttcaggtttcccacagcatggcccctgctgacacgagaacccaaagttttcccaaatctaaatcatcaaaacagaatccccaccccaatcccaaattttgttttggttctaactacctccagaatgtgttcaataaaatgcttttataatat

SEQ ID NO: 1040 - DNA, 3494 bp, Homo sapiens
  Genbank Accession No. M22324
taatttttgcccagtctgcctgttgtggggctcctcccctttggggatataagcccggcctggggctgctccgttctctgcctggcctgaggctccctgagccgcctccccaccatcaccatggccaagggcttctatatttccaagtccctgggcatcctggggatcctcctgggcgtggcagccgtgtgcacaatcatcgcactgtcagtggtgtactcccaggagaagaacaagaacgccaacagctcccccgtggcctccaccaccccgtccgcctcagccaccaccaaccccgcctcggccaccaccttggaccaaagtaaagcgtggaatcgttaccgcctccccaacacgctgaaacccgattcctaccaggtgacgctgagaccgtacctcacccccaatgacaggggcctgtacgtttttaagggctccagcaccgtccgtttcacctgcaaggaggccactgacgtcatcatcatccacagcaagaagctcaactacaccctcagccaggggcacagggtggtcctgcgtggtgtgggaggctcccagccccccgacattgacaagactgagctggtggagcccaccgagtacctggtggtgcacctcaagggctccctggtgaaggacagccagtatgagatggacagcgagttcgagggggagttggcagatgacctggcgggcttctaccgcagcgagtacatggagggcaatgtcagaaaggtggtggccactacacagatgcaggctgcagatgcccggaagtccttcccatgcttcgatgagccggccatgaaggccgagttcaacatcacgcttatccaccccaaggacctgacagccctgtccaacatgcttcccaaaggtcccagcaccccacttccagaagaccccaactggaatgtcactgagttccacaccacgcccaagatgtccacgtacttgctggccttcattgtcagtgagttcgactacgtggagaagcaggcatccaatggtgtcttgatccggatctgggcccggcccagtgccattgcggcgggccacggcgattatgccctgaacgtgacgggccccatccttaacttctttgctggtcattatgacacaccctacccactcccaaaatcagaccagattggcctgccagacttcaacgccggcgccatggagaactggggactggtgacctaccgggagaactccctgctgttcgaccccctgtcctcctccagcagcaacaaggagcgggtggtcactgtgattgctcatgagctggcccaccagtggttcgggaacctggtgaccatagagtggtggaatgacctgtggctgaacgagggcttcgcctcctacgtggagtacctgggtgctgactatgcggagcccacctggaacttgaaagacctcatggtgctgaatgatgtgtaccgcgtgatggcagtggatgcactggcctcctcccacccgctgtccacacccgcctcggagatcaacacgccggcccagatcagtgagctgtttgacgccatctcctacagcaagggcgcctcagtcctcaggatgctctccagcttcctgtccgaggacgtattcaagcagggcctggcgtcctacctccacacctttgcctaccagaacaccatctacctgaacctgtgggaccacctgcaggaggctgtgaacaaccggtccatccaactccccaccaccgtgcgggacatcatgaaccgctggaccctgcagatgggcttcccggtcatcacggtggataccagcacggggaccctttcccaggagcacttcctccttgaccccgattccaatgttacccgcccctcagaattcaactacgtgtggattgtgcccatcacatccatcagagatggcagacagcagcaggactactggctgatagatgtaagagcccagaacgatctcttcagcacatcaggcaatgagtgggtcctgctgaacctcaatgtgacgggctattaccgggtgaactacgacgaagagaactggaggaagattcagactcagctgcagagagaccactcggccatccctgtcatcaatcgggcacagatcattaatgacgccttcaacctggccagtgcccataaggtccctgtcactctggcgctgaacaacaccctcttcctgattgaagagagacagtacatgccctgggaggccgccctgagcagcctgagctacttcaagctcatgtttgaccgctccgaggtctatggccccatgaagaactacctgaagaagcaggtcacacccctcttcattcacttcagaaataataccaacaactggagggagatcccagaaaacctgatggaccagtacagcgaggttaatgccatcagcaccgcctgctccaacggagttccagagtgtgaggagatggtctctggccttttcaagcagtggatggagaaccccaataataacccgatccaccccaacctgcggtccaccgtctactgcaacgctatcgcccagggcggggaggaggagtgggacttcgcctgggagcagttccgaaatgccacactggtcaatgaggctgacaagctccgggcagccctggcctgcagcaaagagttgtggatcctgaacaggtacctgagctacaccctgaacccggacttaatccggaagcaggacgccacctctaccatcatcagcattaccaacaacgtcattgggcaaggtctggtctgggactttgtccagagcaactggaagaagctttttaacgattatggtggtggctcgttctccttctccaacctcatccaggcagtgacacgacgattctccaccgagtatgagctgcagcagctggagcagttcaagaaggacaacgaggaaacaggcttcggctcaggcacccgggccctggagcaagccctggagaagacgaaagccaacatcaagtgggtgaaggagaacaaggaggtggtgctccagtggttcacagaaaacagcaaatagtccccagcccttgaagtcacccggccccgatgcaaggtgcccacatgtgtccatcccagcggctggtgcagggcctccattcctggagcccgaggcaccagtgtcctcccctcaaggacaaagtctccagcccacgttctctctgcctgtgagccagtctagttcctgatgacccaggctgcctgagcacctcccagcccctgcccctcatgccaaccccgccctaggcctggcatggcacctgtcgcccagtgccctggggctgatctcagggaagcccagctccagggccagatgagcagaagctctcgatggacaatgaacggccttgctgggggccgccctgtaccctctttcacctttccctaaagaccctaaatctgaggaatcaacagggcagcagatctgtatatttttttctaagagaaaatgtaaataaaggatttctagatgaaaaaaaaaaaaaaaaa

SEQ ID NO: 1041 - DNA, 3715 bp, Homo sapiens
  Genbank Accession No. M23263
gaattccggcggagagaaccctctgttttcccccactctctctccacctcctcctgccttccccaccccgagtgcggagcagagatcaaaagatgaaaaggcagtcaggtcttcagtagccaaaaaacaaaacaaacaaaaacaaaaaagccgaaataaaagaaaaagataataactcagttcttatttgcacctacttcagtggacactgaatttggaaggtggaggattttgtttttttcttttaagatctgggcatcttttgaatctacccttcaagtattaagagacagactgtgagcctagcagggcagatcttgtccaccgtgtgtcttcttctgcacgagactttgaggctgtcagagcgctttttgcgtggttgctcccgcaagtttccttctctggagcttcccgcaggtgggcagctagctgcagcgactaccgcatcatcacagcctgttgaactcttctgagcaagagaaggggaggcggggtaagggaagtaggtggaagattcagccaagctcaaggatggaagtgcagttagggctgggaagggtctaccctcggccgccgtccaagacctaccgaggagctttccagaatctgttccagagcgtgcgcgaagtgatccagaacccgggccccaggcacccagaggccgcgagcgcagcacctcccggcgccagtttgctgctgctgcagcagcagcagcagcagcagcagcagcagcagcagcagcagcagcagcaagagactagccccaggcagcagcagcagcagcagggtgaggatggttctccccaagcccatcgtagaggccccacaggctacctggtcctggatgaggaacagcaaccttcacagccgcagtcggccctggagtgccaccccgagagaggttgcgtcccagagcctggagccgccgtggccgccagcaaggggctgccgcagcagctgccagcacctccggacgaggatgactcagctgccccatccacgttgtccctgctgggccccactttccccggcttaagcagctgctccgctgaccttaaagacatcctgagcgaggccagcaccatgcaactccttcagcaacagcagcaggaagcagtatccgaaggcagcagcagcgggagagcgagggaggcctcgggggctcccacttcctccaaggacaattacttagggggcacttcgaccatttctgacaacgccaaggagttgtgtaaggcagtgtcggtgtccatgggcctgggtgtggaggcgttggagcatctgagtccaggggaacagcttcggggggattgcatgtacgccccacttttgggagttccacccgctgtgcgtcccactccttgtgccccattggccgaatgcaaaggttctctgctagacgacagcgcaggcaagagcactgaagatactgctgagtattcccctttcaagggaggttacaccaaagggctagaaggcgagagcctaggctgctctggcagcgctgcagcagggagctccgggacacttgaactgccgtctaccctgtctctctacaagtccggagcactggacgaggcagctgcgtaccagagtcgcgactactacaactttccactggctctggccggaccgccgccccctccgccgcctccccatccccacgctcgcatcaagctggagaacccgctggactacggcagcgcctgggcggctgcggcggcgcagtgccgctatggggacctggcgagcctgcatggcgcgggtgcagcgggacccggttctgggtcaccctcagccgccgcttcctcatcctggcacactctcttcacagccgaagaaggccagttgtatggaccgtgtggtggtggtgggggtggtggtggcggcggcggcggcggcggcggcggcggcggcggcggcggcggcggcggcggcggcggcgaggcggaagctgtagccccctacggctacactcggccccctcaggggctggcgggccaggaaagcgacttcaccgcacctgatgtgtggtaccctggcggcatggtgagcagagtgccctatcccagtcccacttgtgtcaaaagcgaaatgggcccctggatggatagctactccggaccttacggggacatgcgtttggagactgccagggaccatgttttgcccattgactattactttccaccccagaagacctgcctgatctgtggagatgaagcttctgggtgtcactatggagctctcacatgtggaagctgcaaggtcttcttcaaaagagccgctgaagggaaacagaagtacctgtgcgccagcagaaatgattgcactattgataaattccgaaggaaaaattgtccatcttgtcgtcttcggaaatgttatgaagcagggatgactctgggagcccggaagctgaagaaacttggtaatctgaaactacaggaggaaggagaggcttccagcaccaccagccccactgaggagacaacccagaagctgacagtgtcacacattgaaggctatgaatgtcagcccatctttctgaatgtcctggaagccattgagccaggtgtagtgtgtgctggacacgacaacaaccagcccgactcctttgcagccttgctctctagcctcaatgaactgggagagagacagcttgtacacgtggtcaagtgggccaaggccttgcctggcttccgcaacttacacgtggacgaccagatggctgtcattcagtactcctggatggggctcatggtgtttgccatgggctggcgatccttcaccaatgtcaactccaggatgctctacttcgcccctgatctggttttcaatgagtaccgcatgcacaagtcccggatgtacagccagtgtgtccgaatgaggcacctctctcaagagtttggatggctccaaatcaccccccaggaattcctgtgcatgaaagcactgctactcttcagcattattccagtggatgggctgaaaaatcaaaaattctttgatgaacttcgaatgaactacatcaaggaactcgatcgtatcattgcatgcaaaagaaaaaatcccacatcctgctcaagacgcttctaccagctcaccaagctcctggactccgtgcagcctattgcgagagagctgcatcagttcacttttgacctgctaatcaagtcacacatggtgagcgtggactttccggaaatgatggcagagatcatctctgtgcaagtgcccaagatcctttctgggaaagtcaagcccatctatttccacacccagtgaagcattggaaaccctatttccccaccccagctcatgccccctttcagatgtcttctgcctgttataactctgcactactcctctgcagtgccttgtttaatttcctctattgatgtacagtctgtcatggaattctatttgctgggctttttttttctctttctctcctttctttttcttcttccctccctatctaaccctcccatggcaccttcagactttgcttcccattgtggctcctatctgtgttttgaatggtgttgtatgcctttaaatctgtgatgatcctcatatggcccagtgtcaagttgtgcttgtttacagcactactctgtgccagccacacaaacgtttacttatcttatgccacgggaagtttagagagctaagattatctggggaaatcaaaacaaaaacacccgaattc

SEQ ID NO: 1042 - DNA, 468 bp, Homo sapiens
  Genbank Accession No. M25079
  misc_feature (1)..(468): n = a or c or g or t
atggtncayytnacnccngtggagaagtcygcygtnacngcnctntggggyaaggtnaaygtggatgaagyyggyggygaggccctgggcagnctgctngtggtctacccttggacccagaggttcttngantcnttyggggatctgnnnacnccngangcagttatgggcaaccctaaggtgaaggctcatggcaagaaagtgctcggtgcctttagtgatggcctggctcacctggacaacctcaagggcacctttgccacactgagtgagctgcactgtgacaagctncaygtggatcctgagaacttcaggctnctnggcaacgtgytngtctgygtgctggcccatcactttggcaaagaattcaccccaccagtgcangcngcctatcagaaagtggtngctggtgtngctaatgccctggcccacaagtatcactaagctngcyttyttgytgtccaattt

SEQ ID NO: 1043 - DNA, 1452 bp, Homo sapiens
  Genbank Accession No. M25753
ttggtttctgctgggtgtaggtccttggctggtcgggctccggtgttctgcttctccccgctgagctgctgcctggtgaagaggaagccatggcgctccgagtcaccaggaactcgaaaattaatgctgaaaataaggcgaagatcaacatggcaggcgcaaagcgcgttcctacggcccctgctgcaacctccaagcccggactgaggccaagaacagctcttggggacattggtaacaaagtcagtgaacaactgcaggccaaaatgcctatgaagaaggaagcaaaaccttcagctactggaaaagtcattgataaaaaactaccaaaacctcttgaaaaggtacctatgctggtgccagtgccagtgtctgagccagtgccagagccagaacctgagccagaacctgagcctgttaaagaagaaaaactttcgcctgagcctattttggttgatactgcctctccaagcccaatggaaacatctggatgtgcccctgcagaagaagacctgtgtcaggctttctctgatgtaattcttgcagtaaatgatgtggatgcagaagatggagctgatccaaacctttgtagtgaatatgtgaaagatatttatgcttatctgagacaacttgaggaagagcaagcagtcagaccaaaatacctactgggtcgggaagtcactggaaacatgagagccatcctaattgactggctagtacaggttcaaatgaaattcaggttgttgcaggagaccatgtacatgactgtctccattattgatcggttcatgcagaataattgtgtgcccaagaagatgctgcagctggttggtgtcactgccatgtttattgcaagcaaatatgaagaaatgtaccctccagaaattggtgactttgcttttgtgactgacaacacttatactaagcaccaaatcagacagatggaaatgaagattctaagagctttaaactttggtctgggtcggcctctacctttgcacttccttcggagagcatctaagattggagaggttgatgtcgagcaacatactttggccaaatacctgatggaactaactatgttggactatgacatggtgcactttcctccttctcaaattgcagcaggagctttttgcttagcactgaaaattctggataatggtgaatggacaccaactctacaacattacctgtcatatactgaagaatctcttcttccagttatgcagcacctggctaagaatgtagtcatggtaaatcaaggacttacaaagcacatgactgtcaagaacaagtatgccacatcgaagcatgctaagatcagcactctaccacagctgaattctgcactagttcaagatttagccaaggctgtggcaaaggtgtaacttgtaaacttgagttggagtactatactttacaaactaaaattggcacatgtgcatctgt

SEQ ID NO: 1044 - DNA, 3045 bp, Homo sapiens
  Genbank Accession No. M29874
cagaccatggaactcagcgtcctcctcttccttgcactcctcacaggactcttgctactcctggttcagcgccaccctaacacccatgaccgcctcccaccagggccccgccctctgccccttttgggaaaccttctgcagatggatagaagaggcctactcaaatcctttctgaggttccgagagaaatatggggacgtcttcacggtacacctgggaccgaggcccgtggtcatgctgtgtggagtagaggccatacgggaggcccttgtggacaaggctgaggccttctctggccggggaaaaatcgccatggtcgacccattcttccggggatatggtgtgatctttgccaatggaaaccgctggaaggtgcttcggcgattctctgtgaccactatgagggacttcgggatgggaaagcggagtgtggaggagcggattcaggaggaggctcagtgtctgatagaggagcttcggaaatccaagggggccctcatggaccccaccttcctcttccagtccattaccgccaacatcatctgctccatcgtctttggaaaacgattccactaccaagatcaagagttcctgaagatgctgaacttgttctaccagactttttcactcatcagctctgtattcggccagctgtttgagctcttctctggcttcttgaaatactttcctggggcacacaggcaagtttacaaaaacctgcaggaaatcaatgcttacattggccacagtgtggagaagcaccgtgaaaccctggaccccagcgcccccaaggacctcatcgacacctacctgctccacatggaaaaagagaaatccaacgcacacagtgaattcagccaccagaacctcaacctcaacacgctctcgctcttctttgctggcactgagaccaccagcaccactctccgctacggcttcctgctcatgctcaaataccctcatgttgcagagagagtctacagggagattgaacaggtgattggcccacatcgccctccagagcttcatgaccgagccaaaatgccatacacagaggcagtcatctatgagattcagagattttccgaccttctccccatgggtgtgccccacattgtcacccaacacaccagcttccgagggtacatcatccccaaggacacagaagtatttctcatcctgagcactgctctccatgacccacactactttgaaaaaccagacgccttcaatcctgaccactttctggatgccaatggggcactgaaaaagactgaagcttttatccccttctccttagggaagcggatttgtcttggtgaaggcatcgcccgtgcggaattgttcctcttcttcaccaccatcctccagaacttctccatggccagccccgtggccccagaagacatcgatctgacaccccaggagtgtggtgtgggcaaaatacccccaacataccagatccgcttcctgccccgctgaaggggctgagggaagggggtcaaaggattccagggtcattcagtgtccccgcctctgtagacaatggctctgactccccgcaacttcctgcctctgagagacctgctacaagccagcttccttcccctccatggcaccagttgtctgaggtcacattgcaagtgagtgcaggagtgagattatcgaaaattataatatacaaaatcatatatatatatatgttcttgttttttgagacagagtctcacactgttgcccaggctggagtgcagtggcgtgatcttggctcactgcaacctccacccccggggatcaagcaactctcctgcctcagcctccctagaggctgggattacaggcatgcactaccacgcttggctaatttttgtatttttagtagagatggggtttcactgtgtaggccaggctggtctcgaactcctgaactcaagtgattcacccaccttagcctcccaaagtgctgggattacaggcgtgagtcaccgtgcccagccatgtatatatataattttaaaaattaagctgaaattcacataacataaaattagccgttttaaagtgtaaaatttagtggcgtgtggttcattcacaaagctgtacaaccaccaccatctagttccaaacattttctttttttctgagatggagtctcactctgtcacccaggttcgagttcagtggtgccatctctgtccactgcaacctccacatcctgggttcaagtgattctcctgcctcagcctctggaggagctggtatcacaggcgtcccccaccacgcctggctaaattttgtatttttaggtggtcttgaactcctgatgtcaggtgattctcctagctccaaatgttttcattatctctcccccaacaaaacccatacctatcaagctgtcactccccataccccattctctttttcatctcggcccctgtcaatctggtttttgtcactatggacttaccaattctgaatatttcccataaacagaatcatacaatatttgatttttttttttttttgaaactaagccttgctctgtctcccaggctggagtgctatggtgcaatttttgttcactgcaacctctgccttccaagatcaagagattctccagtctcagctcccaagtagctgggattacaggcatgtactaccatgcctggctaattttcttgtagttttagtagggacatgttggccaggctggtggtgagctcctggcctcaggtgatccacccacctcagtgttcctaagtgctgatattacaggcataatatgtgatcttttgtgtctggttgctttcatgttgaatgctatttttgaggttcgtgcctgttgtagaccacagtcacacactgctgtagtcttcccgagtcctcattcccagctgcctcttcctactgcttccgtctatcaaaaagcccccttggcccaggttccctgagctgtgggattctgcactggtgctttggattccctgatatgttccttcaaatctgctgagaattaaataaacatctctaaagcctgacctcccc

SEQ ID NO: 1045 - DNA, 1110 bp, Homo sapiens
  Genbank Accession No. M36820
gacagagcccgggccacggagctccttgccagctctcctcctcgcacagccgctcgaaccgcctgctgagccccatggcccgcgccacgctctccgccgcccccagcaatccccggctcctgcgggtggcgctgctgctcctgctcctggtggccgccagccggcgcgcagcaggagcgcccctggccactgaactgcgctgccagtgcttgcagaccctgcagggaattcacctcaagaacatccaaagtgtgaaggtgaagtcccccggaccccactgcgcccaaaccgaagtcatagccacactcaagaatgggcagaaagcttgtctcaaccccgcatcgcccatggttaagaaaatcatcgaaaagatgctgaaaaatggcaaatccaactgaccagaaggaaggaggaagcttattggtggctgttcctgaaggaggccctgccttacaggaacagaagaggaaagagagacacagctgcagaggccacctggcttgcgcctaatgtgtttgagcatacttaggagaagtcttctatttatttatttatttatttatttgtttgttttagaagattctatgttaatattttatgtgtaaaataaggttatgattgaatctacttgcacactctcccattatatttattgtttattttaggtcaaacccaagttagttcaatcctgattcatatttaatttgaagatagaaggtttgcagatattctctagtcatttgttaatatttcttcgtgatgacatatcacatgtcagccactgtgatagaggctgaggaatccaagaaaatggccagtaagatcaatgtgacggcagggaaatgtatgtgtgtctattttgtaactgtaaagatgaatgtcagttgttatttattgaaatgatttcacagtgtgtggtcaacatttctcatgttgaagctttaagaactaaaatgttctaaatatcccttggcattttatgtctttcttgtaagatactgccttgtttaatgttaattatgcagtgtttccctctgtgttagagcagagaggtttcgatatttattgatgttttcacaaagaacaggaaaataaaatatttaaaaatat

SEQ ID NO: 1046 - DNA, 3257 bp, Homo sapiens
  Genbank Accession No. M55153
aacaggcgtgacgccagttctaaacttgaaacaaaacaaaacttcaaagtacaccaaaatagaacctccttaaagcataaatctcacggagggtctcggccgccagtggaaggagccaccgcccccgccccgaccatggccgaggagctggtcttagagaggtgtgatctggagctggagaccaatggccgagaccaccacacggccgacctgtgccgggagaagctggtggtgcgacggggccagcccttctggctgaccctgcactttgagggccgcaactaccaggccagtgtagacagtctcaccttcagtgtcgtgaccggcccagcccctagccaggaggccgggaccaaggcccgttttccactaagagatgctgtggaggagggtgactggacagccaccgtggtggaccagcaagactgcaccctctcgctgcagctcaccaccccggccaacgcccccatcggcctgtatcgcctcagcctggaggcctccactggctaccagggatccagctttgtgctgggccacttcattttgctcttcaacgcctggtgcccagcggatgctgtgtacctggactcggaagaggagcggcaggagtatgtcctcacccagcagggctttatctaccagggctcggccaagttcatcaagaacataccttggaattttgggcagtttcaagatgggatcctagacatctgcctgatccttctagatgtcaaccccaagttcctgaagaacgccggccgtgactgctcccggcgcagcagccccgtctacgtgggccgggtgggtagtggcatggtcaactgcaacgatgaccagggtgtgctgctgggacgctgggacaacaactacggggacggcgtcagccccatgtcctggatcggcagcgtggacatcctgcggcgctggaagaaccacggctgccagcgcgtcaagtatggccagtgctgggtcttcgccgccgtggcctgcacagtgctgaggtgcctaggcatccctacccgcgtcgtgaccaactacaactcggcccatgaccagaacagcaaccttctcatcgagtacttccgcaatgagtttggggagatccagggtgacaagagcgagatgatctggaacttccactgctgggtggagtcgtggatgaccaggccggacctgcagccggggtacgagggctggcaggccctggacccaacgccccaggagaagagcgaaggaacgtactgctgtggcccagttccagttcgtgccatcaaggagggcgacctgagcaccaagtacgatgcgccctttgtctttgcggaggtcaatgccgacgtggtagactggatccagcaggacgatgggtctgtgcacaaatccatcaaccgttccctgatcgttgggctgaagatcagcactaagagcgtgggccgagacgagcgggaggatatcacccacacctacaaatacccagaggggtcctcagaggagagggaggccttcacaagggcgaaccacctgaacaaactggccgagaaggaggagacagggatggccatgcggatccgtgtgggccagagcatgaacatgggcagtgactttgacgtctttgcccacatcaccaacaacaccgctgaggagtacgtctgccgcctcctgctctgtgcccgcaccgtcagctacaatgggatcttggggcccgagtgtggcaccaagtacctgctcaacctaaccctggagcctttctctgagaagagcgttcctctttgcatcctctatgagaaataccgtgactgccttacggagtccaacctcatcaaggtgcgggccctcctcgtggagccagttatcaacagctacctgctggctgagagggacctctacctggagaatccagaaatcaagatccggatccttggggagcccaagcagaaacgcaagctggtggctgaggtgtccctgcagaacccgctccctgtggccctggaaggctgcaccttcactgtggagggggccggcctgactgaggagcagaagacggtggagatcccagaccccgtggaggcaggggaggaagttaaggtgagaatggacctcgtgccgctccacatgggcctccacaagctggtggtgaacttcgagagcgacaagctgaaggctgtgaagggcttccggaatgtcatcattggccccgcctaagggacccctgctcccagcctgctgagagcccccaccttgatcccaatccttatcccaagctagtgagcaaaatatgccccttattgggccccagaccccagggcagggtgggcagcctatgggggctctcggaaatggaatgtgcccctggcccatctcagcctcctgagcctgtgggtccccactcaccccctttgctgtgaggaatgctctgtgccagaaacagtgggagccctgacctgtgctgactggggctggggtgagagaggaaagacctacattccctctcctgcccagatgccctttggaaagccattgaccacccaccatattgtttgatctacttcatagctccttggagcaggcaaaaaagggacagcatgcccttggctggatcaggaatccagctccctagactgcatcccgtacctcttcccatgactgcacccagctccaggggcccttgggacacccagagctgggtggggacagtgataggcccaaggtcccctccacatcccagcagcccaagcttaatagccctccccctcaacctcaccattgtgaagcacctactatgtgctgggtgcctcccacacttgctggggctcacggggcctccaacccatttaatcaccatgggaaactgttgtgggcgctgcttccaggataaggagactgaggcttagagagaggaggcagccccctccacaccagtggcctcgtggttataagcaaggctgggtaatgtgaaggcccaagagcagagtctgggcctctgactctgagtccactgctccatttataaccccagcctgacctgagactgtcgcagaggctgtctggggcctttatcaaaaaaagactcagccaagacaaggaggtagagaggggactgggggactgggagtcagagccctggctgggttcaggtcccacgtctggccagcgactgccttctcctctctgggcctttgtttccttgttggtcagaggagtgattgaacctgctcatctccaaggatcctctccactccatgtttgcaatacacaattcc

SEQ ID NO: 1047 - DNA, 1029 bp, Homo sapiens
  Genbank Accession No. M57399
tctgcttttaataagcttcccaatcagctctcgagtgcaaagcgctctccctccctcgcccagccttcgtcctcctggcccgctcctctcatccctcccattctccatttcccttccgttccctccctgtcagggcgtaattgagtcaaaggcaggatcaggttccccgccttccagtccaaaaatcccgccaagagagccccagagcagaggaaaatccaaagtggagagaggggaagaaagagaccagtgagtcatccgtccagaaggcggggagagcagcagcggcccaagcaggagctgcagcgagccgggtacctggactcagcggtagcaacctcgccccttgcaacaaaggcagactgagcgccagagaggacgtttccaactcaaaaatgcaggctcaacagtaccagcagcagcgtcgaaaatttgcagctgccttcttggcattcattttcatactggcagctgtggatactgctgaagcagggaagaaagagaaaccagaaaaaaaagtgaagaagtctgactgtggagaatggcagtggagtgtgtgtgtgcccaccagtggagactgtgggctgggcacacgggagggcactcggactggagctgagtgcaagcaaaccatgaagacccagagatgtaagatcccctgcaactggaagaagcaatttggcgcggagtgcaaataccagttccaggcctggggagaatgtgacctgaacacagccctgaagaccagaactggaagtctgaagcgagccctgcacaatgccgaatgccagaagactgtcaccatctccaagccctgtggcaaactgaccaagcccaaacctcaagcagaatctaagaagaagaaaaaggaaggcaagaaacaggagaagatgctggattaaaagatgtcacctgtggaacataaaaaggacatcagcaaacaggatcagttaactattgcatttatatgtaccgtaggctttgtattcaaaaattatctatagctaagtacacaataagcaaaaacaa

SEQ ID NO: 1048 - DNA, 952 bp, Homo sapiens
  Genbank Accession No. M62402
gcagctgcgctgcgactgctctggaaggagaggacggggcacaaaccctgaccatgaccccccacaggctgctgccaccgctgctgctgctgctagctctgctgctcgctgccagcccaggaggcgccttggcgcggtgcccaggctgcgggcaaggggtgcaggcgggttgtccagggggctgcgtggaggaggaggatggggggtcgccagccgagggctgcgcggaagctgagggctgtctcaggagggaggggcaggagtgcggggtctacacccctaactgcgccccaggactgcagtgccatccgcccaaggacgacgaggcgcctttgcgggcgctgctgctcggccgaggccgctgccttccggcccgcgcgcctgctgttgcagaggagaatcctaaggagagtaaaccccaagcaggcactgcccgcccacaggatgtgaaccgcagagaccaacagaggaatccaggcacctctaccacgccctcccagcccaattctgcgggtgtccaagacactgagatgggcccatgccgtagacatctggactcagtgctgcagcaactccagactgaggtctaccgaggggctcaaacactctacgtgcccaattgtgaccatcgaggcttctaccggaagcggcagtgccgctcctcccaggggcagcgccgaggtccctgctggtgtgtggatcggatgggcaagtccctgccagggtctccagatggcaatggaagctcctcctgccccactgggagtagcggctaaagctgggggatagaggggctgcagggccactggaaggaacatggagctgtcatcactcaacaaaaaaccgaggccctcaatccaccttcaggccccgccccatgggcccctcaccgctggttggaaagagtgttggtgttggctggggtgtcaataaagctgtgcttggggtcaaa

SEQ ID NO: 1049 - DNA, 1587 bp, Homo sapiens
  Genbank Accession No. M63193
gggcgaggggcggacaccggagagacacgggaaaggggtcgggacaggagcacgtggctcagacaccgacgccgggaggccgcagaccccggacgtgtcaggcatccccgcaggcccggagcgatggcagccttgatgaccccgggaaccggggccccacccgcgcctggtgacttctccggggaagggagccagggacttcccgacccttcgccagagcccaagcagctcccggagctgatccgcatgaagcgagacggaggccgcctgagcgaagcggacatcaggggcttcgtggccgctgtggtgaatgggagcgcgcagggcgcacagatcggggccatgctgatggccatccgacttcggggcatggatctggaggagacctcggtgctgacccaggccctggctcagtcgggacagcagctggagtggccagaggcctggcgccagcagcttgtggacaagcattccacagggggtgtgggtgacaaggtcagcctggtcctcgcacctgccctggcggcatgtggctgcaaggtgccaatgatcagcggacgtggtctggggcacacaggaggcaccttggataagctggagtctattcctggattcaatgtcatccagagcccagagcagatgcaagtgctgctggaccaggcgggctgctgtatcgtgggtcagagtgagcagctggttcctgcggacggaatcctatatgcagccagagatgtgacagccaccgtggacagcctgccactcatcacagcctccattctcagtaagaaactcgtggaggggctgtccgctctggtggtggacgttaagttcggaggggccgccgtcttccccaaccaggagcaggcccgggagctggcaaagacgctggttggcgtgggagccagcctagggcttcgggtcgcggcagcgctgaccgccatggacaagcccctgggtcgctgcgtgggccacgccctggaggtggaggaggcgctgctctgcatggacggcgcaggcccgccagacttaagggacctggtcaccacgctcgggggcgccctgctctggctcagcggacacgcggggactcaggctcagggcgctgcccgggtggccgcggcgctggacgacggctcggcccttggccgcttcgagcggatgctggcggcgcagggcgtggatcccggtctggcccgagccctgtgctcgggaagtcccgcagaacgccggcagctgctgcctcgcgcccgggagcaggaggagctgctggcgcccgcagatggcaccgtggagctggtccgggcgctgccgctggcgctggtgctgcacgagctcggggccgggcgcagccgcgctggggagccgctccgcctgggggtgggcgcagagctgctggtcgacgtgggtcagaggctgcgccgtgggaccccctggctccgcgtgcaccgggacggccccgcgctcagcggcccgcagagccgcgccctgcaggaggcgctcgtactctccgaccgcgcgccattcgccgccccctcgcccttcgcagagctcgttctgccgccgcagcaataaagctcctttgccgcg

SEQ ID NO: 1050 - DNA, 1949 bp, Homo sapiens
  Genbank Accession No. M68840
catagaagggtccttcccaccctttgccgtccccactcctgtgcctacgacccaggagcgtgtcagccaaatcatggagaatcaagagaaggcgagtatcgcgggccacatgttcgacgtagtcgtgatcggaggtggcatttcaggactatctgctgccaaactcttgactgaatatggcgttagtgttttggttttagaagctcgggacagggttggaggaagaacatatactataaggaatgagcatgttgattacgtagatgttggtggagcttatgtgggaccaacccaaaacagaatcttacgcttgtctaaggagctgggcatagagacttacaaagtgaatgtcagtgagcgtctcgttcaatatgtcaaggggaaaacatatccatttcggggcgcctttccaccagtatggaatcccattgcatatttggattacaataatctgtggaggacaatagataacatggggaaggagattccaactgatgcaccctgggaggctcaacatgctgacaaatgggacaaaatgaccatgaaagagctcattgacaaaatctgctggacaaagactgctaggcggtttgcttatctttttgtgaatatcaatgtgacctctgagcctcacgaagtgtctgccctgtggttcttgtggtatgtgaagcagtgcgggggcaccactcggatattctctgtcaccaatggtggccaggaacggaagtttgtaggtggatctggtcaagtgagcgaacggataatggacctcctcggagaccaagtgaagctgaaccatcctgtcactcacgttgaccagtcaagtgacaacatcatcatagagacgctgaaccatgaacattatgagtgcaaatacgtaattaatgcgatccctccgaccttgactgccaagattcacttcagaccagagcttccagcagagagaaaccagttaattcagcggcttccaatgggagctgtcattaagtgcatgatgtattacaaggaggccttctggaagaagaaggattactgtggctgcatgatcattgaagatgaagatgctccaatttcaataaccttggatgacaccaagcctgatgggtcactgcctgccatcatgggcttcattcttgcccggaaagctgatcgacttgctaagctacataaggaaataaggaagaagaaaatctgtgagctctatgccaaagtgctgggatcccaagaagctttacatccagtgcattatgaagagaagaactggtgtgaggagcagtactctgggggctgctacacggcctacttccctcctgggatcatgactcaatatggaagggtgattcgtcaacccgtgggcaggattttctttgcgggcacagagactgccacaaagtggagcggctacatggaaggggcagttgaggctggagaacgagcagctagggaggtcttaaatggtctcgggaaggtgaccgagaaagatatctgggtacaagaacctgaatcaaaggacgttccagcggtagaaatcacccacaccttctgggaaaggaacctgccctctgtttctggcctgctgaagatcattggattttccacatcagtaactgccctggggtttgtgctgtacaaatacaagctcctgccacggtcttgaagttctgttcttatgctctctgctcactggttttcaataccaccaagaggaaaaatattgacaagtttaaaggctgtgtcattgggccatgtttaagtgtactggatttaactacctttggcttaattccaatcattgttaaagtaaaaacaattcaaagaatcacctaattaatttcagtagatcaagctccatcttatttgtcagtgtagatcactcatgttaattgatagaataaagccttgtgatcatttctgaaattcacaagtaacgtgtatgtgctcatcagaac

SEQ ID NO: 1051 - DNA, 863 bp, Homo sapiens
  Genbank Accession No. M69199
ggagtctccaactgggagagctgcagctgccgagaggaggagaacgctgaggtcggtcggaccaacggacgcgctgaccgctgccaactgcagctcgcgctgcctcctgctcgcgccgtgccactaaggtcactcccgcctccgagagcccagagccgagatggaaacggtccaggagctgatccccctggccaaggagatgatggcccagaagcgcaaggggaagatggtgaagctgtacgtgctgggcagcgtgctggccctcttcggcgtggtgctcggcctgatggagactgtgtgcagccccttcacggccgccagacgtctgcgggaccaggaggcagccgtggcggagctgcaggccgccctggagcgacaggctctccagaagcaagccctgcaggagaaaggcaagcagcaggacacggtcctcggcggccgggccctgtccaaccggcagcacgcctcctaggaactgtgggagaccagcggagtgggagggagacgcagtagacagagacagaccgagaaggaagggagagacagagggggcgcgcgcacaggagcctgactccgctgggagagtgcaggagcacgtgctgttttttatttggacttaacttcagagaaaccgctgacatctagaactgacctaccacaagcatccaccaaaggagtttgggattgagttttgctgctgtgcagcactgcattgtcatgacatttccaacactgtgtgaattatctaaatgcgtctaccattttgcactagggaggaaggataaatgctttttatgttattattattaattattacaatgaccaccattttgcattttgaaataaaaaactttttataccat

SEQ ID NO: 1052 - DNA, 8930 bp, Homo sapiens
  Genbank Accession No. M69225
gaattccggaaagaaagaacatcgtttcaggaataaaaatgcacagtagtagttatagttaccgtagcagtgattctgtgtttagtaacactaccagcactcgaaccagtcttgattcaaatgaaaatcttctcttggttcattgtggtccaacactgatcaactcttgcattagcttcggcagtgaatcctttgatggacacaggttagaaatgttgcaacagattgccaacagagttcagagggacagtgtcatctgtgaagacaaactgattcttgctggaaatgctcttcagtctgattctaaaagattagaatcaggagtgcagtttcagaatgaagcagaaattgctgggtatatacttgaatgtgagaaccttttacgccagcatgtaattgatgtacagattcttattgatggaaaatactaccaggcagatcaattggtacagagggttgcaaaactgcgtgacgaaattatggccttaaggaacgaatgttcttctgtgtacagcaaaggacgcatactgacaacagaacagacaaagctcatgatatcaggaatcactcaaagtttaaactcaggatttgcacagaccttacaccctagtctgacctcagggctgacccagagtttaacaccttccctaacctcttctagtatgacttctggcctgtcatcagggatgacttcccgcctgactccatctgtcactccagcttatacacctggtttcccatcaggattagttccaaatttcagttcaggagtagagccaaattcattgcaaactttgaagttgatgcagatccgaaaaccccttctaaagtcttctttgctggatcaaaatttaacagaagaagaaatcaatatgaaatttgttcaggatcttttgaattgggttgatgagatgcaggtacaactggaccgcactgagtggggctcagatttgccaagtgttgaaagccatttagaaaatcataaaaatgttcatagagctattgaagaatttgaatctagtctcaaagaagctaaaatcagtgagattcaaatgacagcacctcttaaactgacttatgcagaaaagttgcacagattagagagtcagtatgcaaaactcttgaatacatccaggaatcaagaacggcaccttgatacactccataattttgtaagtcgtgcgactaatgaacttatttggttgaatgaaaaagaagaggaggaagttgcttatgactggagtgagagaaacaccaacatagctaggaaaaaagattatcatgctgaattaatgagagaacttgatcaaaaggaagaaaatattaaatcagttcaggagatagcagagcagctacttctagaaaatcatccagcccggttaactattgaggcctacagagcggcaatgcagacgcagtggagctggatcttacagctctgccagtgtgtggagcagcacataaaggagaacacagcgtatttcgagtttttcaatgatgccaaagaagctactgattacttaaggaatctaaaagatgccattcagcggaagtacagctgtgatagatcaagcagcattcacaagctagaagaccttgttcaggaatcaatggaagagaaagaagaacttctgcagtacaaaagcactatagcaaacctaatgggaaaagcaaaaacaataattcaactgaagccaaggaattctgactgtccactcaaaacttctattccgatcaaagctatctgtgactacagacaaattgagataaccatttacaaagacgatgaatgtgttttggcaaataactctcatcgtgctaaatggaaggtcattagtcctactgggaatgaggctatggtcccatctgtgtgcttcaccgttcctccaccaaacaaagaagcggtggaccttgccaacagaattgagcaacagtatcagaatgtcctgactctttggcatgagtctcacataaacatgaagagtgtagtatcctggcattatctcatcaatgaaattgatagaattcgagctagcaatgtggcttcaataaagacaatgctacctggtgaacatcagcaagttctaagtaatctacaatctcgttttgaagattttctggaagatagccaggaatcccaagtcttttcaggctcagatataacacaactggaaaaggaggttaatgtatgtaagcagtattatcaagaacttcttaaatctgcagaaagagaggagcaagaggaatcagtttataatctctacatctctgaagttcgaaacattagacttcggttagagaactgtgaagatcggctgattagacagattcgaactcccctggaaagagatgatttgcatgaaagtgtgttcagaatcacagaacaggagaaactaaagaaagagctggaacgacttaaagatgatttgggaacaatcacaaataagtgtgaggagtttttcagtcaagcagcagcctcttcatcagtccctaccctacgatcagagcttaatgtggtccttcagaacatgaaccaagtctattctatgtcttccacttacatagataagttgaaaactgttaacttggggttaaaaaacactcaagctgcagaagccctcgtaaaactctatgaaactaaactgtgtgaagaagaagcagttatagctgacaagaataatattgagaatctaataagtactttaaagcaatggagatctgaagtagatgaaaagagacaggtattccatgccttagaggatgagttgcagaaagctaaagccatcagtgatgaaatgtttaaaacgtataaagaacgggaccttgattttgactggcacaaagaaaaagcagatcaattagttgaaaggtggcaaaatgttcatgtgcagattgacaacaggttacgggacttagagggcattggcaaatcactgaagtactacagagacacttaccatcctttagatgattggatccagcaggttgaaactactcagagaaagattcaggaaaatcagcctgaaaatagtaaaaccctagccacacagttgaatcaacagaagatgctggtgtccgaaatagaaatgaaacagagcaaaatggacgagtgtcaaaaatatgcagaacagtactcagctacagtgaaggactatgaattacaaacaatgacctaccgggccatggtagattcacaacaaaaatctccagtgaaacgccgaagaatgcagagttcagcagatctcattattcaagagttcatggacctaaggactcgatatactgccctggtcactctcatgacacaatatattaaatttgctggtgattcattgaagaggctggaagaggaggagattaaaaggtgtaaggagacttctgaacatggggcatattcagatctgcttcagcgtcagaaggcaacagtgcttgagaatagcaaacttacaggaaagataagtgagttggaaagaatggtagctgaactaaagaaacaaaagtcccgagtagaggaagaacttccgaaggtcagggaggctgcagaaaatgaattgagaaagcagcagagaaatgtagaagatatctctctgcagaagataagggctgaaagtgaagccaagcagtaccgcagggaacttgaaaccattgtgagagagaaggaagccgctgaaagagaactggagcgggtgaggcagctcaccatagaggccgaggctaaaagagctgccgtggaagagaacctcctgaattttcgcaatcagttggaggaaaacacctttaccagacgaacactggaagatcatcttaaaagaaaagatttaagtctcaatgatttggagcaacaaaaaaataaattaatggaagaattaagaagaaagagagacaatgaggaagaactcttgaagctgataaagcagatggaaaaagaccttgcatttcagaaacaggtagcagagaaacagttgaaagaaaagcagaaaattgaattggaagcaagaagaaaaataactgaaattcagtatacatgtagagaaaatgcattgccagtgtgtccgatcacacaggctacatcatgcagggcagtaacgggtctccagcaagaacatgacaagcagaaagcagaagaactcaaacagcaggtagatgaactaacagctgccaatagaaaggctgaacaagacatgagagagctgacatatgaacttaatgccctccagcttgaaaaaacgtcatctgaggaaaaggctcgtttgctaaaagataaactagatgaaacaaataatacactcagatgccttaagttggagctggaaaggaaggatcaggcggagaaagggtattctcaacaactcagagagcttggtaggcaattgaatcaaaccacaggtaaagctgaagaagccatgcaagaagctagtgatctcaagaaaataaagcgcaattatcagttagaattagaatctcttaatcatgaaaaagggaaactacaaagagaagtagacagaatcacaagggcacatgctgtagctgagaagaatattcagcatttaaattcacaaattcattcttttcgagatgagaaagaattagaaagactacaaatctgccagagaaaatcagatcatctaaaagaacaatttgagaaaagccatgagcagttgcttcaaaatatcaaagctgaaaaagaaaataatgataaaatccaaaggctcaatgaagaattggagaaaagtaatgagtgtgcagagatgctaaaacaaaaagtagaggagcttactaggcagaataatgaaaccaaattaatgatgcagagaattcaggcagaatcagagaatatagttttagagaaacaaactatccagcaaagatgtgaagcactgaaaattcaggcagatggttttaaagatcagctacgcagcacaaatgaacacttgcataaacagacaaaaacagagcaggattttcaaacaaaaattaaatgcctagaagaagacctggcgaaaagtcaaaatttggtaagtgaatttaagcaaaagtgtgaccaacagaacattatcatccagaataccaagaaagaagttagaaatctgaatgcggaactgaatgcttccaaagaagagaagcgacgcggggagcagaaagttcagctacaacaagctcaggtgcaagagttaaataacaggttgaaaaaagtacaagacgaattacacttaaagaccatagaggagcagatgacccacagaaagatggttctgtttcaggaagaatctggtaaattcaaacaatcagcagaggagtttcggaagaagatggaaaaattaatggagtccaaagtcatcactgaaaatgatatttcaggcattaggcttgactttgtgtctcttcaacaagaaaactctagagcccaagaaaatgctaagctttgtgaaacaaacattaaagaacttgaaagacagcttcaacagtatcgtgaacaaatgcagcaagggcagcacatggaagcaaatcattaccaaaaatgtcagaaacttgaggatgagctgatagcccagaagcgtgaggttgaaaacctgaagcaaaaaatggaccaacagatcaaagagcatgaacatcaattagttttgctccagtgtgaaattcaaaaaaagagcacagccaaagactgtaccttcaaaccagattttgagatgacagtgaaggagtgccagcactctggagagctgtcctctagaaacactggacaccttcacccaacacccagatcccctctgttgagatggactcaagaaccacagccattggaagagaagtggcagcatcgggttgttgaacagatacccaaagaagtccaattccagccaccaggggctccactcgagaaagagaaaagccagcagtgttactctgagtacttttctcagacaagcaccgagttacagataacttttgatgagacaaaccccattacaagactgtctgaaattgagaagataagagaccaagccctgaacaattctagaccacctgttaggtatcaagataacgcatgtgaaatggaactggtgaaggttttgacacccttagagatagctaagaacaagcagtatgatatgcatacagaagtcacaacattaaaacaagaaaagaacccagttcccagtgctgaagaatggatgcttgaagggtgcagagcatctggtggactcaagaaaggggatttccttaagaagggcttagaaccagagaccttccagaactttgatggtgatcatgcatgttcagtcagggatgatgaatttaaattccaagggcttaggcacactgtgactgccaggcagttggtggaagctaagcttctggacatgagaacaattgagcagctgcgactcggtcttaagactgttgaagaagttcagaaaactcttaacaagtttctgacgaaagccacctcaattgcagggctttacctagaatctacaaaagaaaagatttcatttgcctcagcggccgagagaatcataatagacaaaatggtggctttggcatttttagaagctcaggctgcaacaggttttataattgatcccatttcaggtcagacatattctgttgaagatgcagttcttaaaggagttgttgaccccgaattcagaattaggcttcttgaggcagagaaggcagctgtgggatattcttattcttctaagacattgtcagtgtttcaagctatggaaaatagaatgcttgacagacaaaaaggtaaacatatcttggaagcccagattgccagtgggggtgtcattgaccctgtgagaggcattcgtgttcctccagaaattgctctgcagcaggggttgttgaataatgccatcttacagtttttacatgagccatccagcaacacaagagttttccctaatcccaataacaagcaagctctgtattactcagaattactgcgaatgtgtgtatttgatgtagagtcccaatgctttctgtttccatttggggagaggaacatttccaatctcaatgtcaagaaaacacatagaatttctgtagtagatactaaaacaggatcagaattgaccgtgtatgaggctttccagagaaacctgattgagaaaactatatatcttgaactttcagggcagcaatatcagtggaaggaagctatgttttttgaatcctatgggcattcttctcatatgctgactgatactaaaacaggattacacttcaatattaatgaggctatagagcagggaacaattgacaaagccttggtcaaaaagtatcaggaaggcctcatcacacttacagaacttgctgattctttgctgagccggttagtccccaagaaagatttgcacagtcctgttgcagggtattggctgactgctagtggggaaaggatctctgtactaaaagcctcccgtagaaatttggttgatcggattactgccctccgatgccttgaagcccaagtcagtacagggggcataattgatcctcttactgtcaaaaagtaccgggtggccgaagctttgcatagaggcctggttgatgaggggtttgcccagcagctgcgacagtgtgaattagtaatcacagggattggccatcccatcactaacaaaatgatgtcagtggtggaagctgtgaaggcaaatattataaataaggaaatgggaatccgatgtttggaatttcagtacttgacaggagggttgatagagccacaggttcactctcggttatcaatagaagaggctctccaagtaggtattatagatgtcctcattgccacaaaactcaaagatcaaaagtcatatgtcagaaatataatatgccctcagacaaaaagaaagttgacatataaagaagccttagaaaaacctgattttgatttccacacaggacttaaactgttagaagtatctgagcccctgatgacaggaatttctagcctctactattcttcctaatgggacatgtttaaataactgtgcaaggggtgatgcaggctggttcatgccactttttcagagtatgatgatatcggctacatatgcagtctgtgaattatgtaacatactctatttcttgagggctgcaaattgctaagtgctcaaaatagagtaagttttaaattgaaaattacataagatttaatgcccttcaaatggtttcatttagccttgagaatggttttttgaaacttggccacactaaaatgtttttttttttacgtagaatgtgggataaacttgatgaactccaagttcacagtgtcatttcttcagaactccccttcattgaatagtgatcatttattaaatgataaattgcactcgctgaaagagcacgtcatgaagcaccatggaatcaaagagaaagatataaattcgttcccacagccttcaagctgcagtgttttagattgcttcaaaaaatgaaaaagttttgcctttttctgtatatagtgaccttctttgcatattaaaatgtttaccacaatgtcccatttctagttaagtcttcgcacttgaaagctaacattatgaatattatgtgttggaggaggggaaggattttcttcattctgtgtattttccttacatgtacagtagacgttctctattctatcagccttctatggtacctttttgtcaggacaattaggattgtaatgctaatgcaaaggcagcaattcaaagatcttctagtgcctcatgaataaagttgagatttaaaatttgtaacattgatggaacagctgggaggttagaccaatcattaaggaatgtatgccatacctttctttgctaccataaacattttggaggtgcatctgctatgtgacatggtaaatatggttaagtgaatgaataaaatgttttagtaacctgtgtcggattccgcggaat

SEQ ID NO: 1053 - DNA, 1792 bp, Homo sapiens
  Genbank Accession No. M77836
ctccggacagcatgagcgtgggcttcatcggcgctggccagctggcttttgccctggccaagggcttcacagcagcaggcgtcttggctgcccacaagataatggctagctccccagacatggacctggccacagtttctgctctcaggaagatgggggtgaagttgacaccccacaacaaggagacggtgcagcacagtgatgtgctcttcctggctgtgaagccacacatcatccccttcatcctggatgaaataggcgccgacattgaggacagacacattgtggtgtcctgcgcggccggcgtcaccatcagctccattgagaagaagctgtcagcgtttcggccagcccccagggtcatccgctgcatgaccaacactccagtcgtggtgcgggagggggccaccgtgtatgccacaggcacgcacgcccaggtggaggacgggaggctcatggagcagctgctgagcacggtgggcttctgcacggaggtggaagaggacctgattgatgccgtcacggggctcagtggcagcggccccgcctacgcattcacagccctggatgccctggctgatgggggtgtgaagatgggacttccaaggcgcctggcagtccgcctcggggcccaggccctcctgggggctgccaagatgctgctgcactcagaacagcacccaggccagctcaaggacaacgtcagctctcctggtggggccaccatccatgccttgcatgtgctggagagtgggggcttccgctccctgctcatcaacgctgtggaggcctcctgcatccgcacacgggagctgcagtccatggctgaccaggagcaggtgtcaccagccgccatcaagaagaccatcctggacaaggtgaagctggactcccctgcagggaccgctctgtcgccttctggccacaccaagctgctcccccgcagcctggccccagcgggcaaggattgacacgtcctgcctgaccaccatcctgccaccaccttctcttctcttgtcactagggggactagggggtccccaaagtggcccactttctgtggctctgatcagcgcaggggccagccagggacatagccagggaggggccacatcacttcccactggaaatctctgtggtctgcaagtgcttcccagcccagaacaggggtggattccccaacctcaacctcctttcttctctgctcccaaaccatgtcaggaccaccttcctctagagctcgggagcccggagggtcttcacccactcctactccagtatcagctggcacgggctccttcctgagagcaaaggtcaaggaccccctctgtgaaggctcagcagaggtgggatcccacgccccctcccggcccctccctgccctccattcagggagaaacctctccttcccgtgtgagaagggccagagggtccaggcatcccaagtccagcgtgaagggccacagcccctcttggctgccaagcacgcagatcccatggacatttggggaaagggctccttgggctgctggtgaacttctgtggccaccacctcctgctcctgacctccctgggagggtgctatcagttctgtcctggccctttcagttttataagttggtttccagcccccagtgtcctgacttctgtctgccacatgaggagggaggccctgcctgtgtgggagggtggttactgtgggtggaatagtggaggccttcaactgattagacaaggcccgcccacatcttggagggcatctgccttactgattaaaatgtcaatgtaatct

SEQ ID NO: 1054 - DNA, 3984 bp, Homo sapiens
  Genbank Accession No. M80244
gtcctttcacgcgtgtcttcgtgttggtgcgcttttcactggtcataaagtgctgctcacggccgtgaactgctacagcgtgaaggccgccacccgggtccaggatgcttttgccgccgccaagctcctggccctggccctgatcatcctgctgggcttcgtccagatcgggaagggtgatgtgtccaatctagatcccaagttctcatttgaaggcaccaaactggatgtggggaacattgtgctggcattatacagcggcctctttgcctatggaggatggaattacttgaatttcgtcacagaggaaatgatcaacccctacagaaacctgcccctggccatcatcatctccctgcccatcgtgacgctggtgtacgtgctgaccaacctggcctacttcaccaccctgtccaccgagcagatgctgtcgtccgaggccgtggccgtggacttcgggaactatcacctgggcgtcatgtcctggatcatccccgtcttcgtgggcctgtcctgctttggctccgtcaatgggtccctgttcacatcctccaggctcttcttcgtggggtcccgggaaggccacctgccctccatcctctccatgatccacccacagctcctcacccccgtgccgtccctcgtgttcacgtgtgtgatgacgctgctctacgccttctccaaggacatcttctccgtcatcaacttcttcagcttcttcaactggctctgcgtggccctggccatcatcggcatgatctggctgcgccacagaaagcctgagcttgagcggcccatcaaggtgaacctggccctgcctgtgttcttcatcctggcctgcctcttcctgatcgccgtctccttctggaagacacccgtggagtgtggcatcggcttcaccatcatcctcagcgggctgcccgtctacttcttcggggtctggtggaaaaacaagcccaagtggctcctccagggcatcttctccacgaccgtcctgtgtcagaagctcatgcaggtggtcccccaggagacatagccaggaggccgagtggctgccggaggagcatgcgcagaggccagttaaagtagatcacctcctcgaacccactccggttccccgcaacccacagctcagctgcccatcccagtcctcgccgtccctcccaggtcgggcagtggaggctgctgtgaaaactctggtacgaatctcatccctcaactgagggccagggacccaggtgtgcctgtgctcctgcccaggagcagcttttggtctccttgggccctttttcccttccctcctttgtttacttatatatatattttttttaaacttaaattttgggtcaacttgacaccactaagatgattttttaaggagctgggggaaggcaggagccttcctttctcctgccccaagggcccagaccctgggcaaacagagctactgagacttggaacctcattgctaccacagacttgcactgaagccagacagctgcccagacacatgggcttgtgacattcgtgaaaaccaaccctgtgggcttatgtctctgccttagggtttgcagagtggaaactcagccgtagggtggcactgggagggggtgggggatctgggcaaggtgggtgattcctcccaggaggtgcttgaggccccgatggactcctgaccataatcctagccccgagacaccatcctgagccagggaacagccccagggttggggggtgccggcatctcccctagctcaccaggcctggcctctgggcagtgtggcctcttggctatttctgttccagttttggaggctgagttctggttcatgcagacaaagccctgtccttcagtcttctagaaacagagacaagaaaggcagacacaccgcggccaggcacccatgtgggcgcccaccctgggctccacacagcagtgtcccctgccccagaggtcgcagctaccctcagcctccaatgcattggcctctgtaccgcccggcagccccttctggccggtgctgggttcccactcccggcctaggcacctccccgctctccctgtcacgctcatgtcctgtcctggtcctgatgcccgttgtctaggagacagagccaagcactgctcacgtctctgccgcctgcgtttggaggcccctgggctctcacccagtccccacccgcctgcagagagggaactagggcaccccttgtttctgttgttcccgtgaatttttttcgctatgggaggcagccgaggcctggccaatgcggcccactttcctgagctgtcgctgcctccatggcagcagccaaggacccccagaacaagaagacccccccgcaggatccctcctgagctcggggggctctgccttctcaggccccgggcttcccttctccccagccagaggtggagccaagtggtccagcgtcactccagtgctcagctgtggctggaggagctggcctgtggcacagccctgagtgtcccaagccgggagccaacgaagccggacacggcttcactgaccagcggctgctcaagccgcaagctctcagcaagtgcccagtggagcctgccgcccccacctgggcaccgggaccccctcaccatccagtgggcccggagaaacctgatgaacagtttggggactcaggaccagatgtccgtctctcttgcttgaggaatgaagacctttattcacccctgccccgttgcttcccgctgcacatggacagacttcacagcgtctgctcataggacctgcatccttcctggggacgaattccactcgtccaagggacagcccacggtctggaggccgaggaccaccagcaggcaggtggactgactgtgttgggcaagacctcttccctctgggcctgttctcttggctgcaaataaggacagcagctggtgccccacctgcctggtgcattgctgtgtgaatccaggaggcagtggacatcgtaggcagccacggccccaggtccaggagaagtgctccctggaggcacggaccactgcttcccactggggccggcggggcccacgcacgacgtcagcctcttaccttcccgcctcggctaggggtcctcgggatgccgttctgttccaacctcctgttctgggaggtggacatgcctcaaggatacagggagccggcggcctctcgacggcacgcacttcctgttggctgctgcggctgtgggcgagcatgggggctgccagcgtctgttgtggaaagtagctgctagtgaaatggctggggccgctggggtccgtcttcacactgcgcaggtctcttctgggcgtctgagctggggtgggagctcctccgcagaaggttggtggggggtccagtctgtgatccttggtgctgtgtgccccactccagcctggggaccccacttcagaaggtaggggccgtgtcccgcggtgctgactgaggcctgcttccccctccccctcctgctgtgctggaattccacagggaccagggccaccgcaggggactgtctcagaagacttgatttttccgtccctttttctccacactccactgacaaacgtccccagcggtttccacttgtgggcttcaggtgttttcaagcacaacccaccacaacaagcaagtgcattttcagtcgttgtgcttttttgttttgtgctaacgtcttactaatttaaagatgctgtcggcaccatgtttatttatttccagtggtcatgctcagccttgctgctctgcgtggcgcaggtgccatgcctgctccctgtctgtgtcccagccacgcagggccatccactgtgacgtcggccgaccaggctggacaccctctgccgagtaatgacgtgtgtggctgggaccttctttattctgtgttaatggctaacctgttacactgggctgggttgggtagggtgttctggcttttttgtggggtttttatttttaaagaaacactcaatcatcctag

SEQ ID NO: 1055 - DNA, 1071 bp, Homo sapiens
  Genbank Accession No. M84526
gcagttctggtcctcctaggagcggccgcctgcgcggcgcggccccgtggtcggatgctgggcggcagagaggccgaggcgcacgcgcggccctacatggcgtcggtgcagctgaacggcgcgcacctgtgcgcaggcgtcctggtggcggagcggtgggtgctgagcgcggcgcactgcctggaggacgcggccgacgggaaggtgcaggttctcctgggcgcgcactccctgtcgcagccggagccctccaagcgcctgtacgacgtgctccgcgcagtgccccacccggacagccagcccgacaccatcgaccacgacctcctgctgctacagctgtcggagaaggccacactgggccctgctgtgcgccccctgccctggcagcgcgtggaccgcgacgtggcaccgggaactctctgcgacgtggccggctggggcatagtcaaccacgcgggccgccgcccggacagcctgcagcacgtgctcttgccagtgctggaccgcgccacctgcaaccggcgcacgcaccacgacggcgccatcaccgagcgcttgatgtgcgcggagagcaatcgccgggacagctgcaagggtgactccgggggcccgctggtgtgcgggggcgtgctcgagggcgtggtcacctcgggctcgcgcgtttgcggcaaccgcaagaagcccgggatctacacccgcgtggcgagctatgcggcctggatcgacagcgtcctggcctagggtgccggggcctgaaggtcagggtcacccaagcaacaaagtcccgagcaatgaagtcatccactcctgcatctggttggtctttattgagcacctactatatgcagaaggggaggccgaggtgggaggatcattggatctcaggagttggagatcagcatgggccacgtagcgcgactccatctctacaaataaataaaaattagctgggcaattggcgggcatggaggtgggtgcttgtagttccagctactcaggaggctgaggtgggaggatgacttgaacgcaggaggctgaggctgcagtgagttgtgattgcaccactgccct

SEQ ID NO: 1056 - DNA, 4669 bp, Homo sapiens
  Genbank Accession No. M91669
ccgctgcaaatttctagaagaaaacatcaggagaagaaagagagagggggatttattcaaagttgtttccaattccttcaaaacctcaaaccaggtggctatggtatggatgtaaccaagaaaaacaaacgagatggaactgaagtcactgagagaattgtcactgaaacagtaaccacaagacttacatccttaccaccaaaaggcgggaccagcaatggctatgctaaaacagcctctcttggtggagggagccggctggagaaacaaagcctgactcatggcagcagcggctacataaactcaactggaagcacacgaggccatgcctccacctctagttacaggagggctcactcacctgcctccactctgcccaactccccaggctcaacctttgaaaggaaaactcacgttacccgccatgcgtatgaagggagctccagtggcaactcttctccggagtaccctcggaaggaatttgcatcttcttcaaccagaggacggagtcaaacacgagagagtgaaattcgagttcgactgcagagtgcgtccccatccacccgatggacagaattggatgatgttaagcgtttgctcaaggggagtcgatcggcaagtgtgagccccacccggaattcctccaacacactccccatccccaagaaaggcactgtggagaccaaaattgtgacagcgagctcccagtcggtgtcaggcacctacgatgcaacgatcctggatgccaaccttccctcccatgtgtggtcctccaccctgcccgcggggtcctccatggggacctatcacaacaacatgacaacccagagctcatccctcctcaacaccaatgcctactctgcgggatcagtcttcggagttccaaacaacatggcgtcctgctcacccactttgcaccctggactcagcacatcctcctcagtgtttggcatgcagaacaatctggcccccagcttgaccaccctgtcccatggcaccaccaccacttccacagcatatggggtgaagaaaaacatgccccagagtcctgcggctgtgaacactggcgtttccacctccgccgcctgcaccacaagtgtgcagagcgatgaccttttgcacaaggactgcaagttcctgatcctagagaaagacaacacacctgctaagaaggagatggagctgctcatcatgaccaaggacagcgggaaggtctttacagcctcccctgccagcatcgctgcaacttctttttcagaagacaccctaaaaaaagaaaagcaagctgcctacaatgctgactcaggcctaaaagccgaagctaatggagacctgaagactgtgtccacaaagggcaagaccaccactgcagatatccacagctacagcagcagtggtggtggtggcagtggaggaggtggcggtgttggtggcgctggcggcggcccttggggaccagcgccagcctggtgcccctgcggctcctgctgcagctggtggaagtggctgctgggcctgctgctcacctggctgctactcctggggctgctcttcggcctcattgctctggcggaggaggtgaggaagctgaaggcgcgtgtggatgagctggagaggatcaggaggagcatactgccctatggggacagcatggatagaatagaaaaggaccgcctccagggcatggcacccgcggcgggagcagacctggacaaaattgggctgcacagtgacagccaggaggagctctggatgttcgtgaggaagaagctaatgatggaacaggaaaatggaaatctccgaggaagccctggccctaaaggtgacatgggaagtccaggccctaaaggagatcgagggttccctgggactccaggtatccctgggcccttgggccacccaggtccacaaggaccaaagggtcaaaaaggcagcgtgggagatcctggcatggaaggccccatgggccagagagggcgagaaggccccatgggacctcgtggtgaggcagggcctcctggatctggagagaaaggggaaagaggggctgctggtgaaccaggtcctcatggcccacctggtgtcccaggttctgtgggtcccaaaggttccagcggctctcctggcccacagggccctccaggtcctgtaggtctccaagggctccgaggtgaagtaggacttcctggtgtcaaaggtgacaaaggaccaatgggaccaccaggacccaaaggtgaccagggtgagaaaggacctcgaggcctcacaggcgagcctggcatgagaggtttgcctggtgctgttggtgagcccggggctaaaggagcaatgggtcctgctggcccagacggacaccaaggcccaagaggtgaacaaggtcttactgggatgcctggaatccgtggcccaccaggaccttctggagacccaggaaagccaggtctcacaggaccccagggacctcagggacttcccggtacccctggccgaccaggaataaaaggtgaaccaggagctccaggcaagatcgtgacttcggaggggtcatcgatgctcactgtcccaggccccccaggacctcctggagccatgggacccccaggacctccaggtgccccaggccctgccggcccagctggtctcccaggacatcaagaagttcttaatttacaaggtcccccaggcccacccggcccacgtgggccaccagggccttccattccaggcccaccaggaccccgaggcccaccaggggagggtttgccaggcccaccaggcccaccaggatcgttcctgtccaactcagaaaccttcctcttcggccccccaggcccacctggccccccaggtcccaagggagaccaaggtcccccaggccccagaggacaccaaggcgagcaaggcctcccaggtttctcaacctcagggtccagttctttcggactcaaccttcagggaccaccaggcccacctggcccccagggaccaaaaggtgacaaaggtgatccgggtgttccaggggctcttggcattcctagtggtccttctgaagggggatcatcaagtaccatgtacgtgtcaggcccgccagggccccctgggccccctgggcctccgggctctatcagcagctctggccaggagattcagcagtacatctctgagtacatgcagagtgacagtattagatcttacctatccggagttcagggtcccccaggcccacctggtcccccaggacctgtcaccaccatcacaggcgagactttcgactactcagagctggcaagccacgttgtgagctacttacggacttcggggtacggtgtcagcttgttctcgtcctccatctcttctgaagacatcctggctgtgctgcagcgggatgacgtgcgtcagtacctacgtcagtacttgatgggccctcggggtccgccagggccaccaggagccagtggagatgggtccctcctgtctttggactatgcagagctgagtagtcgcattctcagctacatgtcgagttctgggatcagcattgggcttcctggtcccccggggccccctggcttgccgggaacctcctatgaggagctcctctccttgctgcgagggtctgaattcagaggcatcgttggacccccaggtcccccgggtccaccagggatcccaggcaatgtgtggtccagcatcagcgtggaggacctctcgtcttacttacatactgccggcttgtcattcatcccaggccctccaggacctcctggtcccccagggcctcgagggcccccgggtgtctcaggagccctggcaacctatgcagctgaaaacagcgacagcttccggagcgagctgatcagctacctcacaagtcctgatgtgcgcagcttcattgttggccccccaggccctcctgggccgcagggaccccctggggacagccgcctcctgtccacggatgcctcccacagtcggggtagcagctcctcctcacacagctcatctgtcaggcggggcagctcctacagctcttccatgagcacaggaggaggtggtgcaggctccctgggtgcaggcggtgcctttggtgaagctgcaggagacaggggtccctatggcactgacatcggcccaggcggaggctatggggcagcagcagaaggcggcatgtatgctggcaatggcggactattgggagctgactttgctggagatctggattacaatgagctggctgtgagggtgtcagagagcatgcagcgtcagggcctactgcaagggatggcctacactgtccagggcccaccaggccagcctgggccacaggggccacccggcatcagcaaggtcttctctgcctacagcaacgtgactgcggacctcatggacttcttccaaacttatggagccattcaaggaccccctgggcaaaaaggagagatgggcactccaggacccaaaggtgacaggggccctgctgggccaccaggtcatcctgggccacctggccctcgaggacacaagggagaaaaaggagacaaaggtgaccaagtctatgctgggcggagaaggagaagaagtattgctgtcaagccgtgagctagccatggcaggacagctcctggaccaggtctcataatgcatgtggcacttaggtccaaggtctcca

SEQ ID NO: 1057 - DNA, 890 bp, Homo sapiens
  Genbank Accession No. M91670
ggcggaccgaagaacgcaggaagggggccggggggacccgcccccggccggccgcagccatgaactccaacgtggagaacctacccccgcacatcatccgcctggtgtacaaggaggtgacgacactgaccgcagacccacccgatggcatcaaggtctttcccaacgaggaggacctcaccgacctccaggtcaccatcgagggccctgaggggaccccatatgctggaggtctgttccgcatgaaactcctgctggggaaggacttccctgcctccccacccaagggctacttcctgaccaagatcttccacccgaacgtgggcgccaatggcgagatctgcgtcaacgtgctcaagagggactggacggctgagctgggcatccgacacgtactgctgaccatcaagtgcctgctgatccaccctaaccccgagtctgcactcaacgaggaggcgggccgcctgctcttggagaactacgaggagtatgcggctcgggcccgtctgctcacagagatccacgggggcgccggcgggcccagcggcagggccgaagccggtcgggccctggccagtggcactgaagcttcctccaccgaccctggggccccagggggcccgggaggggctgagggtcccatggccaagaagcatgctggcgagcgcgataagaagctggcggccaagaaaaagacggacaagaagcgggcgctgcgggcgctgcggcggctgtagtgggctctcttcctccttccaccgtgaccccaacctctcctgtcccctccctccaactctgtctctaagttatttaaattatggctggggtcggggagggtacagggggcactgggacctggatttgtttttctaaataaagttggaaaagca

SEQ ID NO: 1058 - DNA, 4003 bp, Homo sapiens
  Genbank Accession No. M97935
attaaacctctcgccgagcccctccgcagactctgcgccggaaagtttcatttgctgtatgccatcctcgagagctgtctaggttaacgttcgcactctgtgtatataacctcgacagtcttggcacctaacgtgctgtgcgtagctgctcctttggttgaatccccaggcccttgttggggcacaaggtggcaggatgtctcagtggtacgaacttcagcagcttgactcaaaattcctggagcaggttcaccagctttatgatgacagttttcccatggaaatcagacagtacctggcacagtggttagaaaagcaagactgggagcacgctgccaatgatgtttcatttgccaccatccgttttcatgacctcctgtcacagctggatgatcaatatagtcgcttttctttggagaataacttcttgctacagcataacataaggaaaagcaagcgtaatcttcaggataattttcaggaagacccaatccagatgtctatgatcatttacagctgtctgaaggaagaaaggaaaattctggaaaacgcccagagatttaatcaggctcagtcggggaatattcagagcacagtgatgttagacaaacagaaagagcttgacagtaaagtcagaaatgtgaaggacaaggttatgtgtatagagcatgaaatcaagagcctggaagatttacaagatgaatatgacttcaaatgcaaaaccttgcagaacagagaacacgagaccaatggtgtggcaaagagtgatcagaaacaagaacagctgttactcaagaagatgtatttaatgcttgacaataagagaaaggaagtagttcacaaaataatagagttgctgaatgtcactgaacttacccagaatgccctgattaatgatgaactagtggagtggaagcggagacagcagagcgcctgtattggggggccgcccaatgcttgcttggatcagctgcagaactggttcactatagttgcggagagtctgcagcaagttcggcagcagcttaaaaagttggaggaattggaacagaaatacacctacgaacatgaccctatcacaaaaaacaaacaagtgttatgggaccgcaccttcagtcttttccagcagctcattcagagctcgtttgtggtggaaagacagccctgcatgccaacgcaccctcagaggccgctggtcttgaagacaggggtccagttcactgtgaagttgagactgttggtgaaattgcaagagctgaattataatttgaaagtcaaagtcttatttgataaagatgtgaatgagagaaatacagtaaaaggatttaggaagttcaacattttgggcacgcacacaaaagtgatgaacatggaggagtccaccaatggcagtctggcggctgaatttcggcacctgcaattgaaagaacagaaaaatgctggcaccagaacgaatgagggtcctctcatcgttactgaagagcttcactcccttagttttgaaacccaattgtgccagcctggtttggtaattgacctcgagacgacctctctgcccgttgtggtgatctccaacgtcagccagctcccgagcggttgggcctccatcctttggtacaacatgctggtggcggaacccaggaatctgtccttcttcctgactccaccatgtgcacgatgggctcagctttcagaagtgctgagttggcagttttcttctgtcaccaaaagaggtctcaatgtggaccagctgaacatgttgggagagaagcttcttggtcctaacgccagccccgatggtctcattccgtggacgaggttttgtaaggaaaatataaatgataaaaattttcccttctggctttggattgaaagcatcctagaactcattaaaaaacacctgctccctctctggaatgatgggtgcatcatgggcttcatcagcaaggagcgagagcgtgccctgttgaaggaccagcagccggggaccttcctgctgcggttcagtgagagctcccgggaaggggccatcacattcacatgggtggagcggtcccagaacggaggcgaacctgacttccatgcggttgaaccctacacgaagaaagaactttctgctgttactttccctgacatcattcgcaattacaaagtcatggctgctgagaatattcctgagaatcccctgaagtatctgtatccaaatattgacaaagaccatgcctttggaaagtattactccaggccaaaggaagcaccagagccaatggaacttgatggccctaaaggaactggatatatcaagactgagttgatttctgtgtctgaagttcacccttctagacttcagaccacagacaacctgctccccatgtctcctgaggagtttgacgaggtgtctcggatagtgggctctgtagaattcgacagtatgatgaacacagtatagagcatgaatttttttcatcttctctggcgacagttttccttctcatctgtgattccctcctgctactctgttccttcacatcctgtgtttctagggaaatgaaagaaaggccagcaaattcgctgcaacctgttgatagcaagtgaatttttctctaactcagaaacatcagttactctgaagggcatcatgcatcttactgaaggtaaaattgaaaggcattctctgaagagtgggtttcacaagtgaaaaacatccagatacacccaaagtatcaggacgagaatgagggtcctttgggaaaggagaagttaagcaacatctagcaaatgttatgcataaagtcagtgcccaactgttataggttgttggataaatcagtggttatttagggaactgcttgacgtaggaacggtaaatttctgtgggagaattcttacatgttttctttgctttaagtgtaactggcagttttccattggtttacctgtgaaatagttcaaagccaagtttatatacaattatatcagtcctctttcaaaggtagccatcatggatctggtagggggaaaatgtgtattttattacatctttcacattggctatttaaagacaaagacaaattctgtttcttgagaagagaatattagctttactgtttgttatggcttaatgacactagctaatatcaatagaaggatgtacatttccaaattcacaagttgtgtttgatatccaaagctgaatacattctgctttcatcttggtcacatacaattatttttacagttctcccaagggagttaggctattcacaaccactcattcaaaagttgaaattaaccatagatgtagataaactcagaaatttaattcatgtttcttaaatgggctactttgtcctttttgttattagggtggtatttagtctattagccacaaaattgggaaaggagtagaaaaagcagtaactgacaacttgaataatacaccagagataatatgagaatcagatcatttcaaaactcatttcctatgtaactgcattgagaactgcatatgtttcgctgatatatgtgtttttcacatttgcgaatggttccattctctctcctgtactttttccagacacttttttgagtggatgatgtttcgtgaagtatactgtatttttacctttttccttccttatcactgacacaaaaagtagattaagagatgggtttgacaaggttcttcccttttacatactgctgtctatgtggctgtatcttgtttttccactactgctaccacaactatattatcatgcaaatgctgtattcttctttggtggagataaagatttcttgagttttgttttaaaattaaagctaaagtatctgtattgcattaaatataatatcgacacagtgctttccgtggcactgcatacaatctgaggcctcctctctcagtttttatatagatggcgagaacctaagtttcagttgattttacaattgaaatgactaaaaaacaaagaagacaacattaaaaacaatattgtttcta

SEQ ID NO: 1059 - DNA, 2607 bp, Homo sapiens
  Genbank Accession No. M97936
attaaacctctcgccgagcccctccgcagactctgcgccggaaagtttcatttgctgtatgccatcctcgagagctgtctaggttaacgttcgcactctgtgtatataacctcgacagtcttggcacctaacgtgctgtgcgtagctgctcctttggttgaatccccaggcccttgttggggcacaaggtggcaggatgtctcagtggtacgaacttcagcagcttgactcaaaattcctggagcaggttcaccagctttatgatgacagttttcccatggaaatcagacagtacctggcacagtggttagaaaagcaagactgggagcacgctgccaatgatgtttcatttgccaccatccgttttcatgacctcctgtcacagctggatgatcaatatagtcgcttttctttggagaataacttcttgctacagcataacataaggaaaagcaagcgtaatcttcaggataattttcaggaagacccaatccagatgtctatgatcatttacagctgtctgaaggaagaaaggaaaattctggaaaacgcccagagatttaatcaggctcagtcggggaatattcagagcacagtgatgttagacaaacagaaagagcttgacagtaaagtcagaaatgtgaaggacaaggttatgtgtatagagcatgaaatcaagagcctggaagatttacaagatgaatatgacttcaaatgcaaaaccttgcagaacagagaacacgagaccaatggtgtggcaaagagtgatcagaaacaagaacagctgttactcaagaagatgtatttaatgcttgacaataagagaaaggaagtagttcacaaaataatagagttgctgaatgtcactgaacttacccagaatgccctgattaatgatgaactagtggagtggaagcggagacagcagagcgcctgtattggggggccgcccaatgcttgcttggatcagctgcagaactggttcactatagttgcggagagtctgcagcaagttcggcagcagcttaaaaagttggaggaattggaacagaaatacacctacgaacatgaccctatcacaaaaaacaaacaagtgttatgggaccgcaccttcagtcttttccagcagctcattcagagctcgtttgtggtggaaagacagccctgcatgccaacgcaccctcagaggccgctggtcttgaagacaggggtccagttcactgtgaagttgagactgttggtgaaattgcaagagctgaattataatttgaaagtcaaagtcttatttgataaagatgtgaatgagagaaatacagtaaaaggatttaggaagttcaacattttgggcacgcacacaaaagtgatgaacatggaggagtccaccaatggcagtctggcggctgaatttcggcacctgcaattgaaagaacagaaaaatgctggcaccagaacgaatgagggtcctctcatcgttactgaagagcttcactcccttagttttgaaacccaattgtgccagcctggtttggtaattgacctcgagacgacctctctgcccgttgtggtgatctccaacgtcagccagctcccgagcggttgggcctccatcctttggtacaacatgctggtggcggaacccaggaatctgtccttcttcctgactccaccatgtgcacgatgggctcagctttcagaagtgctgagttggcagttttcttctgtcaccaaaagaggtctcaatgtggaccagctgaacatgttgggagagaagcttcttggtcctaacgccagccccgatggtctcattccgtggacgaggttttgtaaggaaaatataaatgataaaaattttcccttctggctttggattgaaagcatcctagaactcattaaaaaacacctgctccctctctggaatgatgggtgcatcatgggcttcatcagcaaggagcgagagcgtgccctgttgaaggaccagcagccggggaccttcctgctgcggttcagtgagagctcccgggaaggggccatcacattcacatgggtggagcggtcccagaacggaggcgaacctgacttccatgcggttgaaccctacacgaagaaagaactttctgctgttactttccctgacatcattcgcaattacaaagtcatggctgctgagaatattcctgagaatcccctgaagtatctgtatccaaatattgacaaagaccatgcctttggaaagtattactccaggccaaaggaagcaccagagccaatggaacttgatggccctaaaggaactggatatatcaagactgagttgatttctgtgtctgaagtgtaagtgaacacagaagagtgacatgtttacaaacctcaagccagccttgctcctggctggggcctgttgaagatgcttgtattttacttttccattgtaattgctatcgccatcacagctgaacttgttgagatccccgtgttactgcctatcagcattttactactttaaaaaaaaaaaaaaaagccaaaaaccaaatttgtatttaaggtatataaattttcccaaaactgataccctttgaaaaagtataaataaaatgagcaaaagttgaa

SEQ ID NO: 1060 - DNA, 309 bp, Homo sapiens
  Genbank Accession No. M98539
gggtagactgcagtcctccatcctagctttcggtcacacccctcaggactccccagggctgaagctgggatcccggccagccaggtgacccccacgctctggatgtctctgctctgttccttccccgagcccctgccccggctccccgccaaagcacccctgcccactcgggcttcatcctgcacaataaactccggaagcaagtcagtctggctcctggctgtctgcgctgtcatcacccgtcctgggcctggcctggccacccggacctccccctctaaaatctcagcctgacgtcaacaaaggaac

SEQ ID NO: 1061 - DNA, 625 bp, Homo sapiens
  Genbank Accession No. N21030
  misc_feature (1)..(625): n = a or c or g or t
gcttttaagttcagtttaatcagtagtacaatgttatgtatttgccactgaaaccatttagaaccatgcataatcagacagtttagcatgagggtttccatctaggatatggaaattactttagattgctaattttgagttggaaggcgtgagaatttgaataattttgtaaatagtattggaatatttaagataactgagattcacgattttgtacctttaatttatttgatatgcgttagtaagtcttgctttggtttttggcttttggttggagtgctggtcagcagaatgccacccttccccaacaaaagaggttcattccttaatccctggaaccagtgaatgttagtttacatggcaaaatgtgtcctgcagatgtgtttaatattaaaaaccttgaggagggagattatcatgtattatcnggctgggccaacctaatctcatgagtccctagggacaacccttccngtctgcagggaaccngagaaatgggttccgtgacacagactgaacctgctagctccgaagatggaggagggggccagagcccaggaatgtaggcagcctctacaagccggaantggcctagnttaaagcngccagaaaatggggnccctgg

SEQ ID NO: 1062 - DNA, 554 bp, Homo sapiens
  Genbank Accession No. N21031
aaatttaacagataagtttatttgagcaaagaacagtttgggaatcgggcagccctcagaattagaagttcagagctctgctccggcagcatgagcagcaagcttttgtaggctgagctagaagcaaagaaagaaactgcagtcatgtgttgcttaatgatggggatacggtctgaggagtttgctgttagttgattttgtcgtcgtgcaggcatcagagtgcgctacacctgccgcacacctaggctgtgtggtgtggcctattgctcctaggctgcatacctgctccgcatgtgactgtactgaatgcttcaggccattgtaacacaatggtatctaaacacatctaaacatagaaaaggtacagttaaaataaggtattataatcttacgggaccaccatctacatgtgggcccatcattgactgaaacgttgttagcagtgcatgactgctcttagcggtgcatgactgcctgattggctactgctgggcatttgccctaattgtgtggtccatgcatgggcccaagttctgccacagttggctgggtgg

SEQ ID NO: 1063 - DNA, 571 bp, Homo sapiens
  Genbank Accession No. N21131
  misc_feature (1)..(571): n = a or c or g or t
caagggtaactaactccaaaattctttctttagtaaaattgtcacatttgatgtcaatggaatacacaaactcaagtgtgctacaaacaagatgtacagagcatcacagctctgggcagtgcagctgagtgcacctgcctctcatctccacgctgaagtggcaagttcaagcttttgtttagcccagggctgcctggaacactagtgcccagcaccattcctgccacctctgcccccagagcccgcacagggtgggttgaaggctgggtgggtgaacctgggagagcgctggcagctctacaaaattcttcctcctgcccgtagctccctccctccacccacttccagagctgcagggtccctaaaagtttcttaagaaacggggctggggcctggactgggctggttaccaggggctgccctgcaagccatccatcagaggagggagggaaganctgggagactttcaggggcctaacccaccacatctgaanccctgggaggagggaggagattcagggagggncggggcaaccccggagactctggctggcattggtcaccaagggct

SEQ ID NO: 1064 - DNA, 596 bp, Homo sapiens
  Genbank Accession No. N21424
  misc_feature (1)..(596): n = a or c or g or t
atgtgaaaaaccaaatgctttaatgaggctatcaagaacaagtcgattatttcattggatacattaatatcgatccataatatacagtgctatggaccatacagaaattattgctgcatccaacagcaggtgactattattaacattacagtaccaagcatccgcaagagacagtcatttgtcattttttatcaagaaatagggctgttttatactgttattgacatcaactttttcccagtgcatttttcaaaaatattaataagttcattcctttgtgcttttaacttcctatgtattgtatttgttcttattgctttattgtttaaaaacaaccagaaagaattttgtcatcctatgtatgaccaggttgcttgtatgctttttggcaaagtcagaaggtttgggtatttccattgccctactcagaggcagatggacaattttggcattttgggtcactccntatagaggncccaccccgagttaccantctgcacccgggaatccggggantggtgtgggatcatttcctggtaccaacaacaagccccaaccactggcncttgggntagctagccccggaaatgaatccc

SEQ ID NO: 1065 - DNA, 450 bp, Homo sapiens
  Genbank Accession No. N22378
  misc_feature (1)..(450): n = a or c or g or t
ccatttcaatttgtatctgctatcctatttttttttttttgtatttttgtattttttactttcctttatttgcaataaatggttgtggattacttctggaaagcagtaaatcctaaaattgacccatagccatttattcctaagaacataaaaaatgcaaagatctaaaaaattaggagacaattcaaaaccaatgatataatttaaatatgttttgtgaagaacaggggtgcatgatcttgtttttcatatcctctcatttgtaggcagaatgtgtaaatcatgtacaagtgaaatgtatcttctttggtatgataaaaggcaaagtgtcagcttggttggataaagcagatagaaagagagtngaatgatatgcnccgtggccgaatttcctggcaagcccgggggggatncccctaggtttcctagnggcgggccgccancggggtt

SEQ ID NO: 1066 - DNA, 582 bp, Homo sapiens
  Genbank Accession No. N24987
  misc_feature (1)..(582): n = a or c or g or t
ttctttcccggagtttctgagtcctcctcatctgagctagactcaatatcacttcgatcatccttggacaccttgcctcttgaaacagctttgcaagctattttcacaatcaagtaagaccagaagcagttcaacccttgtactagcaatagcagtaggttaaaaacccaccaggaagggtaaggtccaacgatctcccagctttcaaataatgtggtatttaacacccagagaggaaatatacccagtcgtgtggtgataaaaaccacggcaaacataacaaacaggagatcacacattttctgaaacttggcataatttgccattttggcagcctccagaagagcatcagctgaatcatgaagacaaaggaccagcgttcctactcgggccatattgttgnacattatgaaaagggtaatccaaggaaattggtnccaagggtgggtgcagggaccataatgcccaaagtcctttccttttggatatccgtggaactggngaaaccatccaaagggcccaattaaacgnccagctcccagggatgttaatagttggtgaagggncagttngtgagttggc

SEQ ID NO: 1067 - DNA, 631 bp, Homo sapiens
  Genbank Accession No. N25096
  misc_feature (1)..(631): n = a or c or g or t
ctctcttcatnctcagtaattgctagtcccaagaactagaattgcaaatgggcacaacctatatccttcctgtggaagaggaggccactctcttgagctgaagttccagaagagcagttaatgttcaagagaaattgaactcaactcagcaacaaaggactctattttgaagagcaacatatcacaaagctaaatgtgattgtgccaaacacattaggtgcttatttggggtcatgctaggcctttatcaagtaactggaaaacttttcttgcagccacaatctcaatgtcgttagtaggaagataagaggggagaaaaagctgtagaacaaatgtttggggttaccattggaaaatctaatgtctgcaatatttttctcctcacaacttggaaacgttcccagttcattttcagtcctgttgtggagcacagttctgaaggggtttattattggcaaaataagttttggttttggttttggtttatgttggggttttaatggttggccccttgncccttaatgctcaggtccttgtgggagttaatcagccacatcccacggtaccttgagggggaagaagagggtnatccccagaagctaaccaaggcaggggccacatggcccnctat

SEQ ID NO: 1068 - DNA, 460 bp, Homo sapiens
  Genbank Accession No. N25267
  misc_feature (1)..(460): n = a or c or g or t
tccacgtgggaggttttattatgttttacaaccatgaaaacataggaaggtggctgttacagcaaacatttcagatagacgaatcggccaagctccccaaaccccaccttcacagcctcttccacacgtctctcagagattgttgtccttcacttgcaaattcaaggatgttggaagtagacatttaaagtagcaggaacaccatcagtgaaacagaagcagaagtacgatgactttgagaaacaactgatgaaaaatacactacagaaaaccatttctattgtgttatgatgtcagggtggcagatgtgcccagggcttaagtgtccatcctcccaggacactggtcataccgggcctttcggtgatcccctccagaggcaagctggggtgcactntcagctgtgggcctctccctcttttctttcagtgnaggcttgggactcgcagactaacgtant

SEQ ID NO: 1069 - DNA, 407 bp, Homo sapiens
  Genbank Accession No. N27428
  misc_feature (1)..(407): n = a or c or g or t
aactcttctttggttttgattaattctcctttggttttagctaattcagctttaatttgattaaactttagttctaaacaagcagtagcttcttcagtttcaacttttgtggcacaaatgtctttcgctgcttcttctcgagtgtcacatttaccaaccaaatccttgaagatagccaaacgacgttcagcattttcttctaatatctctcgttcttgaagcagagtctccttaaagtcagcttcccgttgagcccaatactgagtaaactcctgtgtaacttcttctcgaattttaaattccaaggttaatttttccnttttttcanttatcagnttttttttcaagtcntctattaagtccaacagttttcctttctcctcgtgggctaatgaaagccttaattt

SEQ ID NO: 1070 - DNA, 422 bp, Homo sapiens
  Genbank Accession No. N31046
  misc_feature (1)..(422): n = a or c or g or t
ctggaggaagctgtcccttgagctcagtgantcccaggcaagcagggcatctggccgacttcccncacaacagctgctcccacatcccctcggacnnaagcttcagccctgactgaggtgggcagacctaagacctgagaccacaagattagctcagtgtctaccaagcatctagccactgtccagggccagagcataccacgtctgcagtgcctgtgagcagagccagcagttgccctgtgactgtaaccaccaaattgtccaaacacccgctgcagttagcaagaagggtaggcttcaacctcctttactgaggagaatgatgcggaggagttttcctcctncagggcntagggcaagggcagggcgancagccnggaaggccggggttgccccacagggaggggggaccnggaaaggnc

SEQ ID NO: 1071 - DNA, 593 bp, Homo sapiens
  Genbank Accession No. N31946
  misc_feature (1)..(593): n = a or c or g or t
aaaatttcataaacatttattcacagcccctttaaaagtacaacagtgaagtaaaaccccaattaaacaactgcccattaacttgttacttaaaatgtagacttaaaaaccaatagactttttttggtgtgtatgcaattgcttttataaacacagtttaggttggaataaggaagtcctaattcatcatgttggagcttgccctcgctgctgcaggctgttgaagtgagcctccttcaaggtctggttgatatgggagtaaagaccttggcatggtacatacccctcatgcaagaactggggaaagtttgcatcgggttcagtaacaatctggtttaagttgccttctggtccacttgctctctctgggatattaatgcggctgctgctcctttcattatcactccatgaaaactctgtatcttgagaatcctgaaagatagggtttctcttattccntttgggctgggtggaatgatggttgccctctttactggcatttcttcttcttttcaaccaaagaaccagcatgttccttcggagaaggcttcgcgggaatttttttcaagcacgaaggggggggcacgangcaa

SEQ ID NO: 1072 - DNA, 580 bp, Homo sapiens
  Genbank Accession No. N32254
  misc_feature (1)..(580): n = a or c or g or t
tagggagaagtgccaacatatttgcagtttattttcaaatggttcagaggctgtctgtgtacatgagaagacaaagataaggcaaatgcagcaaaattgtaataattggtgaatccaggtgaagggactatggctggtctttgtacttttttttccaacttttctgtaggtttaaaattttcaaaataaaaaatgggaaatactttaaaaattgtaatcaaagacattagtacagaaactttcataatgtattttatttttacagtaaaattaatttatgtaaattgatagaattttactaatttcactcccaagttacattaaaaggcttacatatgtttgataatagcatatgtaaactagaactctgaatgatatccattggtcataatacgtactatgtagcggtaatggtgacntttgtgattgcacaagtcnagagatgccccaaatgacattgacctagacatcngggttattcnaaggctgaacngaagttgaatagaagggtttagtccaatacngagatgaaacngaggcagtccnggcgggggggagtgagtgtgtgtgnatatatncc

SEQ ID NO: 1073 - DNA, 428 bp, Homo sapiens
  Genbank Accession No. N39104
  misc_feature (1)..(428): n = a or c or g or t
tttttttttttttttttgtgcanaaactatagacagaatttatttccaagtgttttnctttgattgtacatatttttttcagaaacttttgngaagtttaaaaatttacncaaagatatcangctttgccacatttgtaaagaaatactggccaaaagagacattttaagatgctgaattacaaatgcatacngcatgttttcatgaggtagttgtncaagccattctacatttcctgccctctacctgatcatttngattcaanggttaaaattagttgaacgcagccctgagcattcaagcaatacacagggccatttttttcncccgnaacctcaggccgcactgcagataacgcaaagcattacacgctccactcagacttgttggattanctgattgattataaagcaggctagaagttcatt

SEQ ID NO: 1074 - DNA, 535 bp, Homo sapiens
  Genbank Accession No. N42752
  misc_feature (1)..(535): n = a or c or g or t
gatcgccttagctttcaaaactantttgttttatcatttaagaatacttgaggaacttctttgatcagaattatatttcagagaattgttaaagcatttctgatttaaagaaaaaaccatctaattattgaagcatttctgtatttcacatgggggtaacagagacaattatgttatagcgagttacaagttgcaatttacatcntcctataacacatgacttgattggtctaagttgccagaggtatcgggtaactggtcattgttttgttttgtttgttttattcttccttttttttggagtcacactacatgtatagtattgctcacgttagcagttttctgtaaggagggccaagtggtcagggataataggtggacttttttactccacctattttaccacaactccaccctggcagggtgacgggtccaatgccttgcctgnctcccatctttaattccaccggttaatggttaatttatggccaactccagggggggnaaaaccataacaagnccctaggtttgggng

SEQ ID NO: 1075 - DNA, 575 bp, Homo sapiens
  Genbank Accession No. N45224
  misc_feature (1)..(575): n = a or c or g or t
gacggtcttcaggtttatttcttaaatcaattaggaaataaaaccacagtgcccaggaaagttcacatgagacgccacggtgtctcttgccatggccccaccactccaggggccagggggtgctgctggagggaggacagacggacaggcggcctgggttggcggccccagaaaggctggcgtggatgttcgagatgagccaccagcgaaccagtagggatgtctgggccgtcctggtgggattgtctgggacatcgccaccaacacggtgtcagagccatcagtggggacatcggaggggccaccaccaggtggggtatattcaacaggctagaacccctgaggcttgagaggccaacccccggcaggagacctcccctgacccctctgctgcctctcctgtgggaccctccagtagacacaccagatgaggacacccaggaggcctcctcccaggacaggaggcagctggctgggcagccacgcattcagggttcagggccctccagcangagctccatggagatggctaatggggacatcaagcaggggctacagtggtacatccagtggtc

SEQ ID NO: 1076 - DNA, 529 bp, Homo sapiens
  Genbank Accession No. N45320
  misc_feature (1)..(529): n = a or c or g or t
gttataagctttttcttttttagaatttaagcttatgagtttatctacgcccactatattcataattacagttttatatctgcatacaaaagctatgtaaaaatccatttttcccaaatatacaaattttttttggatagtttaaaacattttcgatcacagatttcaacagagttttaggctgaaaaaaatatcaccatctagcaatatcacttaacactgtttgcaaaacacaaatcttccaatgactgtaaatctttttctattctgtagtatttttctgattctcagggcatgaaaacattatgggaaaaaaaaggattttctacgaagaaagcatggagaactaatttggctctatggtcaaattaaaaatgccaagttaataagggagaaccaaaagaaagaagtggcataatgtcacatcagctcattcatgcccggataatttctgtatcaacaatacatatgtaaagtggtcnccttttggnctacattggggcnccctaattnccatgngtattancgg

SEQ ID NO: 1077 - DNA, 647 bp, Homo sapiens
  Genbank Accession No. N45415
  misc_feature (1)..(647): n = a or c or g or t
ataagacacaaattatatattgttatgaagcactttttaccaacggtcnnttcanttacattttatagctgcgtgcgaaaggcttccagatgggagacccatctctcttgtgctccagacttcatcacaggctgctttttatcaaaaaggggaaaactcatgcctttcctttttaaaaaatgcttttttgtatttgtccatacgtcactatacatctgagctttataagcgcccgggaggaacaatgagcttggtggacacatttcattgcagtgttgctccattcctagcttgggaagcttccgcttagaggtcctggcgcctcggcacagctgccacgggctctcctgggcttatggccggtcanagcctcagtgtgactccacagtggcccctgtagccgggcaagcagggagcaggtctctctgcatctgttctctgaggaantcaagtttggttgccagaaaaatgtgcttcattcccccctgggttaatttttacacgccctagggaacatttccaagatcctgtgaatggcgagacaaatgatcctttaaagaaggtgtggggtctttccaacctgagganttctgaaaggtcacaagggtcaaaaattaatgnttcagaaccatgtgaggttccaacac

SEQ ID NO: 1078 - DNA, 524 bp, Homo sapiens
  Genbank Accession No. N46855
  misc_feature (1)..(524): n = a or c or g or t
atttgtcagaagactgtttattggacctgggagggggtgtaacactatcacaaaggccaccctgaactcttgatcatcagatagaccaaatccatcccctactgaaaaggatcttaggtaggaaaaacttgggacacagccatccacatcttccaaacagaggaaaagccatcatgcggactctttgtgggtgagagctactgtgtaaacagttcagggatggggaaggcgagaactgcagggaaagcctggaaattatgtaactccactcaaaagctggacctgaagaggccgccgcctcttggggcccccaccctgggcaagtcagaaggaaaagccacaggacaggtgatggtggccgccatctcctttcaggacaccatgctctcctctttgangctggtccttggtcttgcagaaagtgacacagggaccagatgtcacccangtgggcaagcntccttgggccatgaagggggcaccgganttgggcacttggagccnagaccttgaagggagctgcc

SEQ ID NO: 1079 - DNA, 475 bp, Homo sapiens
  Genbank Accession No. N48809
tgatgttttgtagagatgggattttgccatgttgctcaggctggtatctatttcttcttgaatgaattttggtactttttatttttcaaggaatttgtttatgatgttgaagttgttaaatttattagcataaaattattcataatattctattggctttttaatacccataggatgtatcatgatgtcgcttctctccttcctgatatttaaaagacttactgagttttaaatggtataaatttctggcatctggcaggtgctaaataaatgtttcctggatcgaaatctacagtctcaaggagtcaaggctacaattcttaagttgcttcagatgactggttctatctatttatcaatacatccatcgatccactcatccactcatccatgcatcctcctacccttcctcttccccgtcaaacattcatccatccaattggtggcttggggaaagggacaaaaggggaaaaaa

SEQ ID NO: 1080 - DNA, 459 bp, Homo sapiens
  Genbank Accession No. N49591
tgaagaaataaatttttttaatgaagtgttatttgagcattctggagcatcatacaaatataggacagactgaaggaatacatgcagcttaatttgagttaacattttttgaaattttatattgcaaaagtatacgtatttaccgttgtgaaattagaaaggataggcaaagagggcggtctacaaagcactccctagatccaccatactgagacaacacttaatgctttgatggatttatttattttatactttctacgcatgtgcatgtattgtatacatacatgttcatggttaaatataaacagttatccttggtgttctgtttatccatttattgttatgaagtaaatccccaaagagtacatttcctttggcccgagggagtcttttgctacatactgcagtacataatgaaaactaaaaaaggggctaacttttcagccctgtgacattatg

SEQ ID NO: 1081 - DNA, 550 bp, Homo sapiens
  Genbank Accession No. N50065
  misc_feature (1)..(550): n = a or c or g or t
ggagacagagtgtcgctatgtttcccaggctggaatgcagtggcactatcctggctaactccagccttgacctcctgggtacaagttatcctctcacctcagtctcccgagtagttgggactacaggcacgtgccagaacaccccactaattttgtttattttttgtagagaggaagtctcactatgttgctcaggcgggtctccaattcctgggctcaagtgatcctcccacctcagcctcccaaaatgctgggattacaggcctgagccactctgctcagctgacattttcaatcttgttattagatcactcttcctcttttctctgagctctgataactttccaaattgtactcatatccacagaggcaacaactttgggagttagattaatatccaatcttccggactacactggggtcaaaatacagcctgacaagtttttgaattggttttgaacttaagcagtaagggaccagggtccaatctctaagtgaattcctgggtgggattcaaataaagttncagacaacttagccatctttggag

SEQ ID NO: 1082 - DNA, 460 bp, Homo sapiens
  Genbank Accession No. N51335
  misc_feature (1)..(460): n = a or c or g or t
tttttttttttcctgatttaaagtattttaatgcgagctgttaagtatgttagcatctgcctgggttcttatcggtcagtcattacatagaccccaaatcataaaggngttctagttttatatctatggggaaggctggaaaattaccacaaggggagagagagaaggtggtgtaaaaaggcagcctaactaactatttttaaaagcagatcaggagatacaggagctaggtgagatgctgtggacagtgcatgaggttcaattgtgaaaaccgatgtcctcattaatgacagagagaactctgtccctccatatacttggctgggcatcatcagtccagggtctcttatacttggagttttccanatgtttggtttcatgaagcacactttaccaaaatttaggaaaagaagagaaagatctccaacttttaaggtaatatacttttggccataaatan

SEQ ID NO: 1083 - DNA, 493 bp, Homo sapiens
  Genbank Accession No. N52086
  misc_feature (1)..(493): n = a or c or g or t
tacaataattgttttggggaataaatgagaaaaactatataaagcattcagcacaggccttaaataaatgacaactgttaaggttattaactactgaaagcatgagatctagttttgccccatatcctatactatcttgcaacaaagggatactaaaaataactcgggacaccttttggggggtccctagtttagcctaagtaaaaatttccaggaatcttgaggctaactttaaagcatggagtctggacctaacagtggctgcttacagcaggccatggtagaacttgcctttcaattttctttctgcctatgatagcatctacagcaggatattagctcagccctatgataattcgggtgattcagttctagtggatatttagttgccagctactaaccctgaagggcaaaagcaaataggctgaaagaaagancaaggctctggtcaggactaatttagattggttgcnggacaattnaaaattcatcn

SEQ ID NO: 1084 - DNA, 498 bp, Homo sapiens
  Genbank Accession No. N52352
  misc_feature (1)..(498): n = a or c or g or t
gctacaaatattttacatttattataggaatacaataaagaggttctgcagacacatgagtggtaactggtctattggaaaagaaaagacaattaaaaaatgatctaagtttacaaaaatgatgaatcatgctttaaaaatgtagaaacaattaaaaaatatcctacaatgttagccaaagttcaaagtgtatttcttttgaatgtaaaaactaacaaataaataagtgttaaatacagatctgagtaaaaatgataaaagatagacaaccaactgctttatatatttagctttcatccatttttcagacttgtttataaagccagataaacccgccaaagccttgtttgtgttttacactgaactttccagaagaagcaccctatttccagtgtttatccacttcacaaattccatnatcttaaaaccancaaaaatggattaaaggtgctttagcctaacattaaatggacctaaatccggcaaccacggcggtgn

SEQ ID NO: 1085 - DNA, 400 bp, Homo sapiens
  Genbank Accession No. N56877
  misc_feature (1)..(400): n = a or c or g or t
cagaactaaaaaaaatatttcatttcattctgaataaaaaacagaacagacagaactcttggaaattctgaaaacaatgtcatcgctacagcaaaatttcacagaaatcatcgcagagtggggaccaaggccaggccctgacccgccgtgaaggtngcctctccggggaggggcacgacgcccagtggncangagaggggcaggcacaggcggtggctgtgccctctgaccagccctgccgggtctctcgggaccgagctcaaagcccagcccccagcagctgcntcgggactcccaccggggctgggaggggctgcccgtcctcaagacgcccccgtgcgaganccttcctgctggcggacgttccacatgcccctcttggagtggtagtggtgataga

SEQ ID NO: 1086 - DNA, 481 bp, Homo sapiens
  Genbank Accession No. N57539
  misc_feature (1)..(481): n = a or c or g or t
ccaaaaccacacagcttccctttttattgatgctcaagaagtgaactttaaatgacatttcataagcaaaacacaaatgaaaacacctaatgtgcatgtatagtatatgtaaacatacatagtatatggactcaatcatcctcatctaaatataaagagaacaactggttctttgacctcaaaaataaattcaatgttggcattactgtttttaacttacagtgttttatatttaacaggaaaaattatgaataaccaagtttggtgtggtcatggatttcatgttaaggtataaatagagtttttaagaaataatctgtataataaaataagtttacttttgaatcgcagtacagtcatttccttcaatcaataaaaatattccctgattacaaagcagccttattttggcaaatggtatttcaggaaaatagctctagcaatatttgaaataccacactattttaaaaaggcngcgaag

SEQ ID NO: 1087 - DNA, 330 bp, Homo sapiens
  Genbank Accession No. N59432
  misc_feature (1)..(330): n = a or c or g or t
tttagagattcagtctgatttatttgaagataccttttacatttgttttaagataagctgtgaaataaatatttngtataaatgtatngcaaggtttggaggtaaacaagcaggtatggtagatacattcagccctggctttcgcagagcgtgagttcagaagaaatacaggactagactgtgagacgctctgataagtgatacatttctctgacatttaccagttctacgcactgactgatgtttatccagagtaaacatactgttgagaattatctatttncaaataaatggaggccaggcgcggtggctcacgcntgtaatcccagc

SEQ ID NO: 1088 - DNA, 413 bp, Homo sapiens
  Genbank Accession No. N62126
  misc_feature (1)..(413): n = a or c or g or t
aagagttgcatattttactttatttttattaaattaaaagctacagtctggcagcgattccagaacagggtaaggaggttcctcacaggggtcagagaagagcggagaaagacagactgacggagactgagacacaggagagaaaggacaaggttaagggagaactgtatctgatgaacacacacagccggctccatggcgggtgacggggagctcacatcagcccaatttctcctccccggcacccgaagttcagcggtggagcagtatgtgggggcggttaggaatcaagagaccctcccttccccaccctaggtccttntctcggcttggtcgtggagcacagcacattaccagaaaaagncaagggcaattgangggcagggaaaccgggagnatattntacacgggga

SEQ ID NO: 1089 - DNA, 444 bp, Homo sapiens
  Genbank Accession No. N63237
  misc_feature (1)..(444): n = a or c or g or t
tttttttttactgctaatcaacattacaagatccacaatggcttaaaacaacctgaaaaccttcattcattaatgatagtcaatttctccctcaactctgacttactatagtggaaatgggactcctgtgccattagaaatgattttcatcaatacaagtgaaccttcaattagaaaagccgactgaccagaaccctagttagtggggattttactgtctaaagacaaagataagtgaattgcccaaaagtgcacgtctttacccccactagcatcttagattctacatcctctttttatgcatcactcaacccttccattccctttgactctatagaatacacagctctctaagagtggattcgccacattttggcattggcacangtgttccctggaacttcaatcactcataacagcaccttcagagtttttggcattttt

SEQ ID NO: 1090 - DNA, 577 bp, Homo sapiens
  Genbank Accession No. N63913
  misc_feature (1)..(577): n = a or c or g or t
ttatttaaaaagcttgtctctgccacttcctgtgtgacctgggcaagtcattttacctctaagagcctcaaatttcctcatctataaagtggaaatataaatacaaagcttgcagaaatgtcaggaaaataaataaattaaatgctaaatagtcaatgagggatattaggcaaaggccagttttggtggcattttaacctatggagactcagtgcctctgtgtgtcccattatcacctccaagacatcctggcaacaccaccgcttgggactagccagcagggaggcccaggacacctgccacctgataaagtggctcctgctctctattgggcttcttatgaacactactgggctcttacctatctatcttgaagcctctatggacaaaaaagaggccaaaagaggaatgggcacaatggtatcaactcaaacgtgtgagcccggcatggtgggctcacgctggtaattccagcactttgggaggcacaggcgggtggttcacttgaggtcaagagtttgagaccagcccggccaacgtggggaaaacccgtctctactaaaaatncaaaatcagc

SEQ ID NO: 1091 - DNA, 623 bp, Homo sapiens
  Genbank Accession No. N64648
  misc_feature (1)..(623): n = a or c or g or t
tcagttatacattttattctctaataggtacaatactaaaataaacacaaattaaaaaaaagttttattaaaacaaaactgtacaaaaaagcagtatactacattttaattacagaacagtctactgtccaaaaggcactaatccagaataggagatacaatcgatacaggactcatttgaactattttattcaaaacaatagagcgcttgtttctttgaccatttacatctacgaaacaagggctttttgctacagccattacacattgttataaatatgagtcctacgggtgaaggtgcagtatcactctccctagaggaggttcccattaagtgggaccactgtgggagctcagaggcggatggcgcagttggggtggggcctggggacctgccacatggttggcccgtcagcccctggacacccggagcttgtctttcagcctggcctccgggtgggttggtttctgggccattactggcagccacttttcaccccctcttggtggttttaagcaccgggcnaaagtggggttctgagaagctccaggtaactgggggctggaagtttccgggggattgaagcntcccanccgggggaggcatttttgggaacccgaan

SEQ ID NO: 1092 - DNA, 525 bp, Homo sapiens
  Genbank Accession No. N76867
  misc_feature (1)..(525): n = a or c or g or t
gcttgctgagtccaaaccccaagcacagaggggcatgatcagacagctctggggcacagactgagaggaggaactcagcacacccttcctttccaaggccagtgacattgtctgacagtggttgccttcaagcaggcagcatcttggttgcttccagcggcagaaagctggccagtgcttacacacgtgtttccagttggagtgttatcagccatggttctgacaatattctagggtccttagatgagcacacttcctgtatctgcattatttttatagcattagtggggttgatccccaggctcacctttccttaccaaataccatcccatcagactgggattaatgggaggagaaactttgaagtcacatgctcaatttcttgagttgattttccccgaccttcatccttttgatgctaaagcaagaagggctctgaaattctcattcctatttcctacatgnatgagtagtgaagaggggagatgctggttttggtgcagggcaaaattaagtctttctggg

SEQ ID NO: 1093 - DNA, 656 bp, Homo sapiens
  Genbank Accession No. N78139
  misc_feature (1)..(656): n = a or c or g or t
gcgcttaaagtaggagnaccatggagccttcctgtggcaggagagacaacaaagcgctattatcctaaggtcaagagaagtgtcagcctcacctgatttttattagtaatgaggacttgcctcaactccctctttctggagtgaagcatccgaagaatgcttggaagtacccctgggcttctcttaacatttaagcaagctgtttttatagcagctcttaataataaagcccaaatctcaagcggtgcttgangggggagggaaagggggaaagcgggcaaccacttttccctagcttttccagaagcctgttaaaagcaaggtctccccacaagcaacttctctgccacatcggcaccccgtgccttttgatctagcacagacccttcacccctcacctcgatgcaagccagtagcttnggatncttggtgggcatgattcatatcgggttcaaggtaacgatggtgtcgaaggtctttgggtgggttgaatatggttagaaaagggcattaaattgcctgcaaattggttaanagaagggtattaaaccacagctaagtagctcnattataatacttatccagtgnctaaaaccacntaaccagtaagtggngaaatacatgttcagaactgtatgctgggtggaaatgtaatt

SEQ ID NO: 1094 - DNA, 570 bp, Homo sapiens
  Genbank Accession No. N79004
  misc_feature (1)..(570): n = a or c or g or t
ggtgttctactaagttttaatttagactgctttaggtacaatagaaaagaaacctgaaaacacatgctgttttagtaacaaataccaggttgccagattcgttggcatacctttgcaaactagaaactagaaacaggagaaaccctttacaggagtaggctacagatatgaaagcnttgtggaagctttgagggcatgagtaatggcattcaggaaagtgttttttcacattggtacatttttagagtttgtcatttaaaaaaaaaaacccaagaaaacaaacaacaaccaaaaaatcccactaaatttgacaaaaatagttgcattactaatggtcacgtctatttctgtctcacatagagagcattaagacatttaggcacttgttttttcctcctaatactggtcttttattttaatctacattaaattgtttaacactnaatatgaaaaatggtaaacttaatttttcctcancaagaaagttatngattgtanttttccnggtcaccttaagaatgtaatcagtcctccgagcctggngcccctnattttcccnaatttaacccc

SEQ ID NO: 1095 - DNA, 527 bp, Homo sapiens
  Genbank Accession No. N80935
  misc_feature (1)..(527): n = a or c or g or t
cctctgccacaaaagacctttaatggcctcctatttattgttcttttgttcatttgttagagttgaatgaactataataacttgtctgacataataagaatgccacaggtataacagataaacctggcaggtggtccaggaatgagagtgtcacaaaataatcactcaacacaagggccacagacctggagattcttcccagccatccctcactcctgccccaggacacaacccatgcaggcccccattccataggaagaggcaggtcccacagtgtctgtggctagaccttaacactgagcagagatgcccgggaagatggcacttcctatgctcgttcccaagtgctctgctcatctgccatgcaggtcaggaccataccccgagtttgtgaggcacccacctctcatactcaccacctcatatgaccacctatcatacccanctctcctatgacccttgcaattgtcccagtgaagtgggaagagctggactagcccattttgcacacagggaactaaggacac

SEQ ID NO: 1096 - DNA, 530 bp, Homo sapiens
  Genbank Accession No. N90525
  misc_feature (1)..(530): n = a or c or g or t
actttcattagtgttttcaatagtgtgggcgcaggtcagaaggtggagaggctggcctcagaggacacccaggcttggggctaagtcccagtgtccatatgaagctgtttctggccttgtccgtttttgttgtcccaggctctgtgcccctcactcagnnctcagtcaagaacttgtctttgtgttgcttcttggggacatgctcagggcagaagtcagagcggaggaggcgggaaaagtagattatgatcatcacgtccagcatgagcaggatacccagcaggaaggtgcccagggtcctctggttcacataacgcaagaagaaatgggtgaggtaggcctnaggggccaggcggaagagaaagtacatgaccaggttcacatacttgttaacccggtagaggagatgatcctgggcattactgattttcatcatcatgcgaatggtgaggaagatgttgctgacttccaccagtagtgttaaacanccccaccgacaaanctgctcccaaanatgccggagaanaaag

SEQ ID NO: 1097 - DNA, 558 bp, Homo sapiens
  Genbank Accession No. N91161
  misc_feature (1)..(558): n = a or c or g or t
tcaacatggaaaaactgttcaggcacaaagattaaacaagcccgcgttgcatcccttggattgtactgaatcactgggtcccccagcctccctacctacccctgcaccccagatntgccttccccatattcatggcctcctcctccaaagcagcccaaagcagcaatgatatttactattttatatcaatctcttgctatatatatatatatctatatatctatatatttgnctatccnatatatacataggnttttaatgcnttgaatgagtgaaggagtgaatagggaaagagcacatgagtgaggtgtaaatgtcaccnaatgcattaagggacatatttgtaggagctggacatgggaaagggntattaaccaacgtggccttgcaggctggagaagtttttcactgtgctggataaggcagtagcaagcagggttgtcagcagtaccacagctaaaggcagccagggggcgaagagtcaggtggcatgagaaaagggaggcagatattnagatccncctgggngagacccgtttaccncctccntcccctaat

SEQ ID NO: 1098 - DNA, 489 bp, Homo sapiens
  Genbank Accession No. N91175
  misc_feature (1)..(489): n = a or c or g or t
tgttaataactctttgggaatatttttcagatttcttagctcagaaccacataaaaacaggccacagactggacttagcttgccagccgtagtatgccaacaaaccagcatttagaagtctgatattttaaatatattataccaaaggcatcagaggtcacaacagttgagttttattctacgttaaataaataaggtagcattatagcaattaaaattacaagttgattaatatattgaattctatatgctagactacaaatcaaatgatggaacaacacagtaaaataaatttcaagcacttatattatataaccgtaatcatgagtgtgcatgtgcatgtgcatgcctgtaaagcatgcacttctccacttgaaaaaaatcagctgaaatttaactagcatacatcaaagctcaagtctccttttatgatcattaaaaccattcacccatttaaataatcaaaactagnagtgatttgttttagag

SEQ ID NO: 1099 - DNA, 563 bp, Homo sapiens
  Genbank Accession No. N95620
  misc_feature (1)..(563): n = a or c or g or t
agaggagactgaaaaagataatttattccatcagaggcatcacaattacagattacagacatttgcaagtaaataatatgcagggttagagcgctgcgttttaacatttaacattcatgagtaaacagagatggccggtgggtaaatatcttgccaaggtggttcctggtattaagccttttgagtctaagatgacaaatccctaggggtcaggtggttttcccgcacgaactcttgtcaatgagaaatccctcagccccttttgtcttgggtctcacagctccagaagtnagccgggccagaacgaagccatcctagagtccccaaggacagccctcccgtggaccccggctaggcccccagagtctcatcctcaggagtgcgccatctgggcctgcgtgccggcggggtctgcagcacaggtccgcgagtcccgganattcaggacgtggttcctggtgagaaagtctccgggtaccagtttgatctcgggagngaaanaaagtggatcccgcctcaagtttgctggtggggtcttgtccctctcggcgggcaantttggg

SEQ ID NO: 1100 - DNA, 691 bp, Homo sapiens
  Genbank Accession No. NM_001885
gacccctcacactcacctagccaccatggacatcgccatccaccacccctggatccgccgccccttctttcctttccactcccccagccgcctctttgaccagttcttcggagagcacctgttggagtctgatcttttcccgacgtctacttccctgagtcccttctaccttcggccaccctccttcctgcgggcacccagctggtttgacactggactctcagagatgcgcctggagaaggacaggttctctgtcaacctggatgtgaagcacttctccccagaggaactcaaagttaaggtgttgggagatgtgattgaggtgcatggaaaacatgaagagcgccaggatgaacatggtttcatctccagggagttccacaggaaataccggatcccagctgatgtagaccctctcaccattacttcatccctgtcatctgatggggtcctcactgtgaatggaccaaggaaacaggtctctggccctgagcgcaccattcccatcacccgtgaagagaagcctgctgtcaccgcagcccccaagaaatagatgccctttcttgaattgcattttttaaaacaagaaagtttccccaccagtgaatgaaagtcttgtgactagtgctgaagcttattaatgctaagggcaggcccaaattatcaagctaataaaatatcattcagcaac

SEQ ID NO: 1101 - DNA, 453 bp, Homo sapiens
  Genbank Accession No. R08000
  misc_feature (1)..(453): n = a or c or g or t
atttcggcacagnaagtaataaagattccatcactctagcaggtccaatgtaccccgtataagtggattacagcagcgtaggattttgtaattccattttaacttggtgcccagttcttctctaaggaattcgcttattccctacattaagcaataagtaaaatatcatgaagatatgaaacttaatttgacttctaccaactaagtgcagagggtgacggaaaaaaaaaaaaaagacagtcataggcatgggtgttaaaggaggactagtctaaggggtcatgggatgaggatttttgtccatggaattcacttactgtttgcctagggctgtccttggggccagccaccgggnttctcaggaggcctccagtgtggatcccnctgggaaaatgtngatccatgtttcaatgtcctttncctaattctggtncattctgtngaagtgggtgc

SEQ ID NO: 1102 - DNA, 456 bp, Homo sapiens
  Genbank Accession No. R11248
  misc_feature (1)..(456): n = a or c or g or t
ctaataatatttctgaatatggaagtaatgataccattccaactataaccagacattttattcccagtgggaaaatgtgtacatgagtttcaaatcggtgggggcagaaacacagctcccaccatgctcacacactgcctcacacagcaaatcgggacctggggcctgggtagacaggatgagaagatttttgagcctgagatcctccttttctacactttcaacatgtcctgaattgataggaaaaatggggactattttgggctctgtatccacttcgtttcgtcatttattttttctntttctttcttccccctcttcccttccctttcttcccttccctttcttcccttcaattcttttccttccctttcaanccttctttttttcaaaccantaattttcccataccccantttaaaggggggttttnggtggncaatngggggnaggggg

SEQ ID NO: 1103 - DNA, 386 bp, Homo sapiens
  Genbank Accession No. R17937
  misc_feature (1)..(386): n = a or c or g or t
ttgttggtnatgagtttttnctttgttgcccagggtggtctcaaactcctgggctcaagcatctgtcagcctcagcctcccaaagtgctgggattacaggtgcgagccaccgtgtntagccaaacatcacttttaaaattaaaataaaattaaaattcagtttttcagtcacactagccacatttcaagtgcaccatggccatctgtggctaccctagtggagggcacaattctctgctgnccctaatcatgatacaaatttggcngtggggctttcggnccagggnataaactaaanagcangcaccattcccaagtgtttgggagacacacactgggggaaaatgatgggagnctcttgagngcaggaagnagtttttttgatt

SEQ ID NO: 1104 - DNA, 452 bp, Homo sapiens
  Genbank Accession No. R20784
  misc_feature (1)..(452): n = a or c or g or t
ctaataacntttgtttttattttcacaaatattttaaaatgcagctacctttgagccacaaaaggaaaaagcagtattccttttatgtatttgatacaaatattaaacataactcagttttagttcattagctcagctcagtgaaaatagctcaggaaaaaaaaagtcataggtaatgctattggtatatgcaggaaaccagaagcgacgacattgagttcaaaatccatttagaattgtagacaggccacaaggggcaggtgaagagagcagccacagagtcactaatacattggncttcaaacnggaaaaactggaaatgtcagttgggtacacaccctaaaaaccaaactcccaactnggaaaggattaattatggtaggctcagggccattgattacngggtttagggattttgtacggtgcctnctgttttttttttttttttgngt

SEQ ID NO: 1105 - DNA, 341 bp, Homo sapiens
  Genbank Accession No. R39938
  misc_feature (1)..(341): n = a or c or g or t
tttttttttttcacattttcaccattttattcattaantgttgtcagatggtttagtggggcatgtgggnaaagaagggtaggagttntccccccatccccgtgcacaaggtcanggacatgctgggggctcctggagggaganggaggatggggtcagcctagcccctcccaccccagatttntgcgagggcccccaggatggangggtngtggggggatgggcagacccttcantccaggntagggaagctnagattataaggttagggacccacatcagaagcaanttacaaanttagaaacctggggttagttngtcgggtttcaagaaantacaaa

SEQ ID NO: 1106 - DNA, 496 bp, Homo sapiens
  Genbank Accession No. R42575
  misc_feature (1)..(496): n = a or c or g or t
ttttttttgaatcacgaagcctcagtttactcatcacaaaaatgtatctaacaacagatgtctcagttacttcacaggatttgttgtgaggtccaaaggaaggaacagatgcagaaaacactttaggaggtgggaaaagcttcacaaggttgttctcatgaatcagaaagttgaaaagacctgccatgggtcctccctgggtggaggtcagactagaggacattgggcagtagtccccttcttaaggctgttttgatgacacaaagaaaaggctgagattctgaactatttttttttaacataaatgccacttaactaggggaccagctctgtgcctgtgccaaaccaattgggtntgaggcttnagggagggagttaaggggtggggggacaggggcatacacatttgatggaccaaaggggggntccggnctttcgnaacaaactttttttcagagntttctggggaatttntttcagggcccnattttttttt

SEQ ID NO: 1107 - DNA, 514 bp, Homo sapiens
  Genbank Accession No. R42914
  misc_feature (1)..(514): n = a or c or g or t
ttttttttttaagnaggttaactcattgtttttatttggtaatcagaagaacatacaagtacttatgcattactagatgctgggggaaaattatacattgaaggactgtcaggctcatctgtgcaataaagatttacaataaacacatcattaatttttctgagaacagctcagtatactctgttttacatgaatccttatgatttaatcttgtatttggagatatgatgctatggcatttgggataacattggttaaggcaggcatcttagagaacaggaacactcttcctcaggaatgggatgggccattctttttaccctgtggatgtacaaatggcaaattaccaacctggcatttttatctgncccggaggtggtatttcacatcanggggaggtaccattcttntccaccacccntgggaaattcaaaaccaggtccccttattacccctctntccccttttggggggggcctttntcgggtttcctncccggntttcccntcccttt

SEQ ID NO: 1108 - DNA, 435 bp, Homo sapiens
  Genbank Accession No. R49146
  misc_feature (1)..(435): n = a or c or g or t
ttttttttttttttttttggctaagccctatatggagctgggagatgtaaagacatataatgtcccagggatgcaatcgcacctgccccaagaaggcatgcacctcaaccaactttctcaactttgcctatcatgcttcgatctaaatcaaattgtgtttgtttcacagggtggaaatagaggacttgtgtgaggaggtgccactgtgattgagtcaacaatggagcaaatgaagcgctaaaagggtaatagcattttcctcaaattatacgatcatcattgggaaacccaggcattttgacaaagtnttcaaacatcaggggattgggagttagtatcacgtagttgnggagccctggttttggggccttacantctgattntctgaaaagncctttttantgagggtgggagtgattttnccttncctttctt

SEQ ID NO: 1109 - DNA, 503 bp, Homo sapiens
  Genbank Accession No. R49392
  misc_feature (1)..(503): n = a or c or g or t
ttttttttaattttttgtagagacggattcanccatgtttcccaggctggtctcgaactcctgggctcaagcaatcctgccgcattggcctctcaaagtgctgcgattacaggtgtgagccattgtgcctggccaaaatgtgtatttttaatatgctgctgagttgactcttgtatgatcaggaggagcatttgcgaatcactgattttttgaaaaatctgagttcagtttctgccacttcctaggcagtcaggcattggccaagctacttaacctctagcctcagagccttcctggcaaggccattttgagggtgtttgtgcaccatctgtgacacacacaggcaaacactgtaaatggggagccatgttaggggcctggggggatttttccccagttgtgggccactttcaggaattcaggaacaagtggattaaggggttccacaagaggagttgntttttccaaggnaaacagagttttttgncccttggaaccatttt

SEQ ID NO: 1110 - DNA, 542 bp, Homo sapiens
  Genbank Accession No. R51371
  misc_feature (1)..(542): n = a or c or g or t
ttttttttcacagatacatatatatacttttaataggaaattagtgctcaatactctgccctttgtgtgggggaaaacattcttttatacaaggatttttacctagctattacaatagtttaaggtaatgtacaatatatatttgacacagagagtgttattagatgttcgcactgcataaaatgaatcctctagcctttgatgtcttaaaaagaagttttacaactattagtgaagctaaggcactacatattttccttccacaatatggatttgtgtcatttaaactgaagaagttgatcttgtgtgatgacaggtatgtctgaagaggcgtctttcagagtcatctatcctcttgggcatgccaatgcaagngggaaagccttcctcaaaccaaagaaattcttccnaccaaaacatagggtaacctttaggccnggtttcttgacaaaagcttgtaggccgggntttttttncgtactgcaccncctgggttggggttcctgncctgggccaattntgttngtggccgccgtttttng

SEQ ID NO: 1111 - DNA, 465 bp, Homo sapiens
  Genbank Accession No. R53594
  misc_feature (1)..(465): n = a or c or g or t
aatgaaaaaagaaattncttttattggcttggttttctagcattgctggtgcagtgggggcctgagctggggtgcagtcggcagtgtcactgggcccgtttgggactgtgtgtcaggcatggtgttcatgaataaccattacctaatttaatcttcacagttacctagcaaagaaagcacgataatccgcatgctagactcaaagaaacactcagcaaagttgaagcactcaccctgagtgacagagctagtgaggcagaaagaactgaaacgccccagccagagccccacacgtgctttctccacacccactcagtaagcggtaactcaaatgcaagaaaagaggcctaaggaagacctctggggaaacagccagttgttgtatttaattttaggctgaagtgtccgaaaagggctcctaccttnttgccagaagggtttnaaggaggttaacataagtacact

SEQ ID NO: 1112 - DNA, 427 bp, Homo sapiens
  Genbank Accession No. R54660
  misc_feature (1)..(427): n = a or c or g or t
angagtatacaagtttattttaaggngttcanagggttaccagttggataggncataataatatatagagatatgggaaattaagacctatgaagttttaattatttgcataagagtatgcccttgcatcataagaaaacatataaaaacagaantatgtttcaaacttgtgtataacatatatatacatgttcaacttgatcaggttcttactgaanttatttatttatttttattatactttaagttctggggntacatgtgctgaatgtgcagggnttgttacacagggtntacatgtgcccnggggactttggctggcaccccattcaaccccatncatctacatcgggnatttctcccnaatggctatccctccccctagggccncatcccccccacgggcnccggggggntggggngtttc

SEQ ID NO: 1113 - DNA, 473 bp, Homo sapiens
  Genbank Accession No. R62346
  misc_feature (1)..(473): n = a or c or g or t
ctttctagtgtagataagactatcaaaaataaaatatttttcaaaaaccagctgatccaacatagtgaactacttctggttgagagccctggtctaagttaataaatttcctttaaggctatttatatttttttcaaatataagactaacatttatttttaaactaattagaatatattggctgggcactcttgcctcattagctcttgcccaaagtgctgggaattacaggtatgagccaccacactcagcctgcttctgagttttatgtctagttttctatagctcaagattaaaaataaaaactcttaccttataccatgcataaatcaaagggctaaacattaaaattaatgctataactaactacattaggaggaaatgcngttgccntatttgggttttttggnttacccttttccnggggtatcagtttgtctttaaantggccnggatccgacctatngctgttt

SEQ ID NO: 1114 - DNA, 474 bp, Homo sapiens
  Genbank Accession No. R67627
  misc_feature (1)..(474): n = a or c or g or t
agtgaatatcagagtttacttgtgggttgtgcaanacaggagacctttgganacccctctgttatttccttgagccccagaaactacccatgcctacancccaaaagcagcagcagcatgagaacgattaacacacattgaggacctattgtgtgggggtccccggaatgcctcacatgaagtcatgtgtcttgtcagagcccttggagacagggccanttcgtgtccccatattacagatgaggaaactgaggcacaaagcagctaagccctcagccatgggtccacagccagggaaccggggtccanctttccagccgtgcccctggggcctggggctgntccaagtttgggcacacatgggttttgaaatttttcacagcccgagggggttgcagcgggtttttncagagtntgagatttgcacatcagcagctgggggttttggggtttcaggtnagattcngggttttt

SEQ ID NO: 1115 - DNA, 379 bp, Homo sapiens
  Genbank Accession No. R69584
  misc_feature (1)..(379): n = a or c or g or t
aactgataattnaggattttctatgcagatgatgacatttacagcaaatgataacaggggcctatctttaaaaggacaagcaaaaagactagggaaaatatttctaaaatatattaaagacaaaaacaatcaatgtttacaacgtataaagagtgccaaggccagggagcggtactcatgtgcatgagtacctgtaccactaaaacaggatttggggaggccgagcattttggggaggctgaggcggatgggatcacttgagggtcagggagtttgaggaccagcctgggccaacatgggtaaaacccagtctctactaggaantacaaaanttagacaggcctgggtggccacatgcctgttaggccccagctttttc

SEQ ID NO: 1116 - DNA, 367 bp, Homo sapiens
  Genbank Accession No. R70255
  misc_feature (1)..(367): n = a or c or g or t
caggaggtaggaggagattcttaaatctctgaagagttctgggctggggttctgggaggcaaggggctggaaaatttgggccactgattggtcagggtaagggagattgaatcattaggatatggaaattgcattctttgatgatttagcttctggtagggtccttcagaccagctgacatcagtagtttcatcagtatgcaggacctgaaagantntctcgaagggaaaacttagcatttcataatgttcaagctgttatctntagaggcagttaaggggaactataatcttntaacagactccacataattctgaaggcaatagccnaacaactttgagggaggggtcagccagcaaagtgaccc

SEQ ID NO: 1117 - DNA, 490 bp, Homo sapiens
  Genbank Accession No. R73518
  misc_feature (1)..(490): n = a or c or g or t
tcanagtaaatggccnncaattttttaacgaaatctcactactgcaaatgcattgttgtcctagctaatgaatgcatagagtattgcctgcaaaataataattgagattctatttttaagaagcttagaacagtacatggtgcatagcaaagactctgtgtatgtgaagccagattttaaaatatggtaacaagtgtctgaaaatatgtggctcaatttgtctcccggttacttttccctctccccctttaaaatgtagaggaaggagaagaagagataagaggtttgtgagtgaagacaagggccctttaaggcctggggaagactaacgccatagggntctccctctgccttaaaaggcacagggantcttagtgggggaaaaagaagtgggtgataaatagccagtccntgtgcccgggatttccaagtcagtgcgtgccnggggtcccactgcgggtcacgngcactctgggnctctntttgnaat

SEQ ID NO: 1118 - DNA, 512 bp, Homo sapiens
  Genbank Accession No. R74561
  misc_feature (1)..(512): n = a or c or g or t
ngataattgtgttgtgatgcttctcactttgattgcaatgatgatgtccaaggtaagctattaaaaggcaggttacttccaaatcgcactgaaggaaaaggttaagaataatacatgatcacagaaatgcataccactgtctgtaaacccaacaaaattcactgttctcttttggatttatttagcctgatgtatttttaattcaatttttatggtgatgggcaaatcattcttggtaaatgtaaatcaaacatgattgatttaaaacttcatggaatttgtaggaaaattatggacatttttgggtgagaaagaacaatagtccaaaactcacatgggataggagtgtgtttgttttttgcccaaaaatggccccagactttttcccaaaccttcaaaaacgtcttgggaaaattgttaaaggtttgataaccggaaacntctttggggntttttttgtcngacgttttttgcctctaggatgtgncccaccgtggttttttccngtgggt

SEQ ID NO: 1119 - DNA, 435 bp, Homo sapiens
  Genbank Accession No. R83604
  misc_feature (1)..(435): n = a or c or g or t
atgaaccgatggttgagggattgtcacgggaggaacatgacacccgaagacgtctaggtgcccttngagtgccacacatgcccagaccttctcacacccacacaaataggctctgccgtgcactcctacacacacacacacanacacacacacgcttnttcacactcagaacccaggacagccacagncaccgcttaggggaagccactgcagatgcccctggaatgggcacagcacagccagggcgctcttccaggcaggcgaggataacttgagagtttcctagggcaccagggacagagctcagaggcccccgaggtgttgtgtaggaggcggaggcccgcagagcacagagcaggagaagggntttggcctgggaggagaaagccattttggaacaccagggngacctnggacggaaggttccccacaagc

SEQ ID NO: 1120 - DNA, 5828 bp, Homo sapiens
  Genbank Accession No. S62539
cggcggcgcggtcggagggggccggcgcgcagagccagacgccgccgcttgttttggttggggctctcggcaactctccgaggaggaggaggaggagggaggaggggagaagtaactgcagcggcagcgccctcccgaggaacaggcgtcttccccgaacccttcccaaacctcccccatcccctctcgcccttgtcccctcccctcctccccagccgcctggagcgaggggcagggatgagtctgtccctccggccggtccccagctgcagtggctgcccggtatcgtttcgcatggaaaagccactttctccacccgccgagatgggcccggatggggctgcagaggacgcgcccgcgggcggcggcagcagcagcagcagcagcagcagcaacagcaacagccgcagcgccgcggtctctgcgactgagctggtatttgggcggctggtggcggctgggacggttggggggtgggaggaggcgaaggaggagggagaaccccgtgcaacgttgggacttggcaacccgcctccccctgcccaaggatatttaatttgcctcgggaatcgctgcttccagaggggaactcaggagggaaggcgcgcgcgcgcgcgcgctcctggaggggcaccgcagggacccccgactgtcgcctccctgtgccggactccagccggggcgacgagagatgcatcttcgctccttcctggtggcggcggcggctgagaggagacttggctctcggaggatcggggctgccctcaccccggacgcactgcctccccgccggcgtgaagcgcccgaaaactccggtcgggctctctcctgggctcagcagctgcgtcctccttcagctgcccctccccggcgcggggggcggcgtggatttcagagtcggggtttctgctgcctccagccctgtttgcatgtgccgggccgcggcgaggagcctccgccccccacccggttgtttttcggagcctccctctgctcagcgttggtggtggcggtggcagcatggcgagccctccggagagcgatggcttctcggacgtgcgcaaggtgggctacctgcgcaaacccaagagcatgcacaaacgcttcttcgtactgcgcgcggccagcgaggctgggggcccggcgcgcctcgagtactacgagaacgagaagaagtggcggcacaagtcgagcgcccccaaacgctcgatcccccttgagagctgcttcaacatcaacaagcgggctgactccaagaacaagcacctggtggctctctacacccgggacgagcactttgccatcgcggcggacagcgaggccgagcaagacagctggtaccaggctctcctacagctgcacaaccgtgctaagggccaccacgacggagctgcggccctcggggcgggaggtggtgggggcagctgcagcggcagctccggccttggtgaggctggggaggacttgagctacggtgacgtgcccccaggacccgcattcaaagaggtctggcaagtgatcctgaagcccaagggcctgggtcagacaaagaacctgattggtatctaccgcctttgcctgaccagcaagaccatcagcttcgtgaagctgaactcggaggcagcggccgtggtgctgcagctgatgaacatcaggcgctgtggccactcggaaaacttcttcttcatcgaggtgggccgttctgccgtgacggggcccggggagttctggatgcaggtggatgactctgtggtggcccagaacatgcacgagaccatcctggaggccatgcgggccatgagtgatgagttccgccctcgcagcaagagccagtcctcgtccaactgctctaaccccatcagcgtccccctgcgccggcaccatctcaacaatcccccgcccagccaggtggggctgacccgccgatcacgcactgagagcatcaccgccacctccccggccagcatggtgggcgggaagccaggctccttccgtgtccgcgcctccagtgacggcgaaggcaccatgtcccgcccagcctcggtggacggcagccctgtgagtcccagcaccaacagaacccacgcccaccggcatcggggcagcgcccggctgcaccccccgctcaaccacagccgctccatccccatgccggcttcccgctgctcgccttcggccaccagcccggtcagtctgtcgtccagtagcaccagtggccatggctccacctcggattgtctcttcccacggcgatctagtgcttcggtgtctggttcccccagcgatggcggtttcatctcctcggatgagtatggctccagtccctgcgatttccggagttccttccgcagtgtcactccggattccctgggccacaccccaccagcccgcggtgaggaggagctaagcaactatatctgcatgggtggcaaggggccctccaccctgaccgcccccaacggtcactacattttgtctcggggtggcaatggccaccgctgcaccccaggaacaggcttgggcacgagtccagccttggctggggatgaagcagccagtgctgcagatctggataatcggttccgaaagagaactcactcggcaggcacatcccctaccattacccaccagaagaccccgtcccagtcctcagtggcttccattgaggagtacacagagatgatgcctgcctacccaccaggaggtggcagtggaggccgactgccgggacacaggcactccgccttcgtgcccacccgctcctacccagaggagggtctggaaatgcaccccttggagcgtcggggggggcaccaccgcccagacagctccaccctccacacggatgatggctacatgcccatgtccccaggggtggccccagtgcccagtggccgaaagggcagtggagactatatgcccatgagccccaagagcgtatctgccccacagcagatcatcaatcccatcagacgccatccccagagagtggaccccaatggctacatgatgatgtcccccagcggtggctgctctcctgacattggaggtggccccagcagcagcagcagcagcagcaacgccgtcccttccgggaccagctatggaaagctgtggacaaacggggtagggggccaccactctcatgtcttgcctcaccccaaacccccagtggagagcagcggtggtaagctcttaccttgcacaggtgactacatgaacatgtcaccagtgggggactccaacaccagcagcccctccgactgctactacggccctgaggacccccagcacaagccagtcctctcctactactcattgccaagatcctttaagcacacccagcgccccggggagccggaggagggtgcccggcatcagcacctccgcctttccactagctctggtcgccttctctatgctgcaacagcagatgattcttcctcttccaccagcagcgacagcctgggtgggggatactgcggggctaggctggagcccagccttccacatccccaccatcaggttctgcagccccatctgcctcgaaaggtggacacagctgctcagaccaatagccgcctggcccggcccacgaggctgtccctgggggatcccaaggccagcaccttacctcgggcccgagagcagcagcagcagcagcagcccttgctgcaccctccagagcccaagagcccgggggaatatgtcaatattgaatttgggagtgatcagtctggctacttgtctggcccggtggctttccacagctcaccttctgtcaggtgtccatcccagctccagccagctcccagagaggaagagactggcactgaggagtacatgaagatggacctggggccgggccggagggcagcctggcaggagagcactggggtcgagatgggcagactgggccctgcacctcccggggctgctagcatttgcaggcctacccgggcagtgcccagcagccggggtgactacatgaccatgcagatgagttgtccccgtcagagctacgtggacacctcgccagctgcccctgtaagctatgctgacatgcgaacaggcattgctgcagaggaggtgagcctgcccagggccaccatggctgctgcctcctcatcctcagcagcctctgcttccccgactgggcctcaaggggcagcagagctggctgcccactcgtccctgctggggggcccacaaggacctgggggcatgagcgccttcacccgggtgaacctcagtcctaaccgcaaccagagtgccaaagtgatccgtgcagacccacaagggtgccggcggaggcatagctccgagactttctcctcaacacccagtgccacccgggtgggcaacacagtgccctttggagcgggggcagcagtagggggcggtggcggtagcagcagcagcagcgaggatgtgaaacgccacagctctgcttcctttgagaatgtgtggctgaggcctggggagcttgggggagcccccaaggagccagccaaactgtgtggggctgctgggggtttggagaatggtcttaactacatagacctggatttggtcaaggacttcaaacagtgccctcaggagtgcacccctgaaccgcagcctcccccacccccaccccctcatcaacccctgggcagcggtgagagcagctccacccgccgctcaagtgaggatttaagcgcctatgccagcatcagtttccagaagcagccagaggaccgtcagtagctcaactggacatcacagcagaatgaagacctaaatgacctcagcaaatcctcttctaactcatgggtacccagactctaaatatttcatgattcacaactaggacctcatatcttcctcatcagtagatggtacgatgcatccatttcagtttgtttactttatccaatcctcaggatttcattgactgaactgcacgttctatattgtgccaagcgaaaaaaaaaaatgcactgtgacaccagaataatgagtctgcataaacttcatcttcaaccttaaggacttagctggccacagtgagctgatgtgcccaccaccgtgtcatgagagaatgggtttactctcaatgcattttcaagatacatttcatctgctgctgaaactgtgtacgacaaagcatcattgtaaattatttcatacaaaactgttcacgttgggtggagagagtattaaatatttaacataggttttgatttatatgtgtaattttttaaatgaaaatgtaacttttcttacagcacatcttttttttggatgtgggatggaggtatacaatgttctgttgtaaagagtggagcaaatgcttaaaacaaggcttaaaagagtagaatagggtatgatccttgttttaagattgtaattcagaaaacataatataagaatcatagtgccatagatggttctcaattgtatagttatatttgctgatactatctcttgtcatataaacctgatgttgagctgagttccttataagaattaatcttaattttgtattttttcctgtaagacaataggccatgttaattaaactgaagaaggatatatttggctgggtgttttcaaatgtcagcttaaaattggtaattgaatggaagcaaaattataagaagaggaaattaaagtcttccattgcatgtattgtaaacagaaggagatgggtgattccttcaattcaaaagctctctttggaatgaacaatgtgggcgtttgtaaattctggaaatgtctttctattcataataaactagatactgttgatcttttaaaaaaaaaaaaaaaaaaaaaaaaaaaaa

SEQ ID NO: 1121 - DNA, 281 bp, Homo sapiens
  Genbank Accession No. T16144
  misc_feature (1)..(281): n = a or c or g or t
acagtagtccattcctagggggaatgggccccaaggttttgtttttttatttcgtttttggggtacaggtggtgtttggttacatggatgagttctttagtgatttctgcgactttagcgcacccatcacccgagcagtgtacactgtacccaatatgtagtctttcatccctcaccccactccaagatttagttctgccagacgatacatgttgccttcacttctttttagtttatttgcctggacccatctaagtcatacttaaanctctataaagcat

SEQ ID NO: 1122 - DNA, 429 bp, Homo sapiens
  Genbank Accession No. T57042
ggagagatggggtctctatgaagcatggtagagaatggttatagctatgtcttcaaaccaactctgtaatcagttaatgagaaatggaaagcttggataagtgttatatatcactcaaccattcaccatttatagattttcttgcctaatttgttaagattgctagaattaatggataattatagtaaaaattgggaatcctaaaaggagctaacagttttttctttctctgaaggtagggcctgtctaaacaataagacctttattatcatctccataacaaatatactcagtcatgattctcctggggaatatgggggaaggaaaaatcaacaaaaacacaagctttataacacatgaggattcatgggctggtaaacgctacctaaataactttgagtcttgtttcagtcaaaattcttccccatg

SEQ ID NO: 1123 - DNA, 540 bp, Homo sapiens
  Genbank Accession No. T57670
  misc_feature (1)..(540): n = a or c or g or t
ttcaaatttttttggaagtttacaaatgtattacagacatcagtaaaacatcatatccattttacagggcacggatctcaagcaaagtgttcagaacagtctctggcagagccacaccaaaggcctgttgcagaccttcttaacaaatagcttgacactcaacacagaacacagactctggcctgcctcaccttcccaggccctttgaggttttgtttatgcacttgaaatgaaagcaggagatggacaaagcaatcctgtgggagggaaagaatgagtttagggagagggaaaacctgccgaaggtcctaatttgctaaaaaaaaattaattaaaaaatgggagggacttcataggtcctttaccaatgtttaaggtcaggggtcttatggataggaatcatggacacttttatggggaaaggattttggaaaatcaactagggtagggttttagggacagaccttattgggtaggtaactctctctgaaaatttaggaaagcttnggtcagtgaccctgttggatttcctgggcccat

SEQ ID NO: 1124 - DNA, 523 bp, Homo sapiens
  Genbank Accession No. T57773
  misc_feature (1)..(523): n = a or c or g or t
ttggtntgggggnactttaaatacatctttattgtctgaattttttacataagaatatatcattttataaattaaaataaaatttcaaactaagtggtaagagttttaaaatctctaaactgtatagatgatagagagagaaagatctagattggtccatagttatttctaagatacatttactgaaagttgacactataggatttggctgacatgacaagaagaacatgaagaaaattatccttttaggattaaaagaaaaaagcaactaatttcgaatcatctagggtaaaatgaattaatataccttgaatgggaagtccacaccaatttcaaattggcctgggtacttcatctgccctctcttctttgctaattggccaatttgctaagggatgaaccaggacacnggatgccttttatcagccgggaatttcacctacccttttcgggactgcctcaaataagggtttccaccnatttaggcctgccctcaaggagncctgagccngggaggtctnag

SEQ ID NO: 1125 - DNA, 509 bp, Homo sapiens
  Genbank Accession No. T61106
  misc_feature (1)..(509): n = a or c or g or t
tttttcantantcaaggttttatttccagttaggtcccaggatggggaagggagaggagaagtcacaggccattgatcccaactntcatnccctaggagaccatatcccacaccccagggcctgggcatgcctcttttcctccttcaccctggagtcctgggaagttgatttgagaagatgctaggaacacaatgaaagccaattcatccgatccagttttcaagggttatttattaaaccccttggttctgaccccaagctaagtggggactcagcatcagaccctgcacttcagagagccccctgactttgggggaagacagagtcaggagaaaggcagccccagtgtgggccaggggnttcagctgggaaggnaaggacaagggggcttggggagaacccagagtttcaagagatcttngggaaacaggggaacggcatttccagacgggggggcacactttggggattgggtnagggnaagccntccttttttttnttggggagc

SEQ ID NO: 1126 - DNA, 563 bp, Homo sapiens
  Genbank Accession No. T64447
  misc_feature (1)..(563): n = a or c or g or t
agcataggtggtttattgtcacctcagggctctcaggcaggtgggctgttcatncagttagagggagtcctgacatttcacactttaggaactgaggccatgagcggaagnaatgnctaaaggataccgagtcaatagcagantgggaccacccctcattgctccctctggcctccccatccaccctccagctgctcttccatggctggggtggggtgcaagtggggtccttcataagctgaccttggggccttcccagacgggtgttttgtctcgaaagaaatgctaccctcataattgcctccaccacaataatgttcccacctccacattagagatctactgccctttccacaattcacagtcatatttggggtgggtcagcaccacaccaggnctnttgccaccacacctgtccctctggagtccacttncagtcactttcctacggcacagggtttttctgctgggtnccggttggggctgagtcggtcgatgagtgaacttnagcctncaggtccagaccttgaaaaacttcttcctctgcgggttcttctgcatnc

SEQ ID NO: 1127 - DNA, 546 bp, Homo sapiens
  Genbank Accession No. T64637
  misc_feature (1)..(546): n = a or c or g or t
ttgaatggaaantcgtcttgcttgaaatccacangttttcaataagctccccagatganttcctgtgtacattaaatctagaaaccattagtttgagatctctcaaaaataaaaataaaaattgctttcagagagtagcccatgaaatttcccattcttcaaggacaaattccttctgttcagccttggtcctccaactgcagtttacaatttttgttcttctcctgtaaagaatgtcaatggttatcaccttcaatagtttcaatatgtcccccaaagttatgtgtttgaaacttgcaatagtattgggagatgggggcctaatgaggtgattagggtgaagtctctgcccttcatggaaaaggtttaatcccattatcttcagggagtgtgttgggttattaaaaggcaagtttnggctccctctttttcctcacacactcttttttncccttctgccttnaacctttggccgtggggtgggacacaggcaaggaagggccctcatcagangctgggccccttgggcttggaatttcctaggct

SEQ ID NO: 1128 - DNA, 418 bp, Homo sapiens
  Genbank Accession No. T66157
  misc_feature (1)..(418): n = a or c or g or t
tttttagaaagaaatagatttattctcatgtacaaagcggtcacccacgggaccatatacgacagttgcacagagtcctagaaaaacgcatctntctaaaggcaactcagaaaggtaaggcaggtggaccccctcccccaccccacaacgcacacagantgaaacggagaaaaagagagaagccagtgncngggntgacccaagattcccggccctatggggtttcccaagccccagggcacaggtggntatggccttnaagagagagccctgccaggttnanggccaggtttttcattggctgcaggnttgggtaaggggntcaggccaaggggaacantcagggggcctntnagacantcaggnttgggntctctgtgccttaggggtttgcagaaacattccatagcctctgctg

SEQ ID NO: 1129 - DNA, 533 bp, Homo sapiens
  Genbank Accession No. T79574
  misc_feature (1)..(533): n = a or c or g or t
ttgaaatgtccatttctaagacttttccagatacttcatccaccatggactgttttccataaattttcttatgaccttcctttagtttccattcaaattcacctatgtcagaccgaaaacggccatccttgcataaggctccttcaatagtctcacccttcaaggcataaatacaaagtttacttcctttttcatgaagttcgttgatcttaacaatcttctttcttgtccttcctatagcaacaacatgaaaaagaatgcattccatgtttgggattttcacattgggcgtaatatgtgtccatcttctttgctactctttctttggaccaaatggtaattttaaaatgaggaatcactagggcagggcacttgagggggcattcctaaatttatatggtcccatctattgncttttncttccataaacaataatggtncctattaaactgattcctttancctttcacggaaaaggncatagggcacccngggccgngtgggaactcccgngggggtttaccatangctgg

SEQ ID NO: 1130 - DNA, 455 bp, Homo sapiens
  Genbank Accession No. T79945
  misc_feature (1)..(455): n = a or c or g or t
taaatacnttacagctttattaggagaaggctgtggtcacctcagcagccagctcccttgtatacacagtatacacagcccagccagcacccaggtccttccatccttctgcagtacatggagtgcaaaagaaccaaacacaacggcggggagggagggtctaccaatgagtgtcagtgtctagtgcttccgggagccaactgccaggctagggacactcaagtccctcaaactgtcatcagctcctgccagaccccactccagcatgtcgaggttcatatgagagtgtttggggccagactcctccaatcagtgcacgcgatggggcagagggaggctaggggaatccttgaggcccaaagctgttattgggtccatcccccttcaaggaagtttgttggggagcttttcaggaacgtttcctctttctttgtgttagggacattnaggattac

SEQ ID NO: 1131 - DNA, 505 bp, Homo sapiens
  Genbank Accession No. T83654
  misc_feature (1)..(505): n = a or c or g or t
ttgaaggcatactgttttaatgaacattataaccaaaaaaaattgagtcctttgtgctagaaacatgtagaagaaaaattataaatttgtttcaaagaaagctttcagaatcagttttacctaaaatctatagctaagattatcactcccacataccctcacccatgatttcttcctgccaaccttctctcaatagctatatcagtatttggcttgattcatgttcaatattgacaacagcatgtctagttaaatactgctcgcagctggccatgggacatattatgaatacctttgcttcccagatacatttataattgtttagtttttcatttgcttacttctctgggccataattcaaccccaaattatttgccatttgtccagatctctccacatccctgatgggcccagggttgtctacaaatgtcatcttgttcaaagggctctgntccatnctaacctggggaggngtagagggggtnccatgnagaaggggngcaga

SEQ ID NO: 1132 - DNA, 456 bp, Homo sapiens
  Genbank Accession No. T85314
  misc_feature (1)..(456): n = a or c or g or t
gctggtcttntacttggcagatgcacttcaaattaacctgttaaattaggtcatgttctttgagttttgtttctaattcaaactaatcagaattctttaactaatgcttttgaaaagttatctggccatatgaccttggtaaaaagccacaaatacatttgcttaaaatccaacctcaagtcacaaacgaacaagaaagtaatgacatcagaggatgtaagccagtagtctaatactcagcccaccacggtnttactgggagtcgctgacttttaacatttaattatcaattttttttttgggacagtctcgctctgntcacccggggctgggaggtacagtggggtgtggatctcgggcctcactggcaacctctgcctcnggggggtttaatttaattcttgggcctcgaggggccnaaaatttccctataggtgaggtcggtatttaaattct

SEQ ID NO: 1133 - DNA, 458 bp, Homo sapiens
  Genbank Accession No. T92947
  misc_feature (1)..(458): n = a or c or g or t
gagacatgtnntngcnctgtcgcccaggccccngagtgcaatggcatganctcagctcactgcaacctccgcctcccgggttcaagcgattctcctgcctcagcctcccaaagtgctgggattacaggcctgagcacagcgcccgacccggagagctgtttctnaatctgcctggaggaaaatccccagcccccaactttccacatacttcacatagataacactgtaacaactttgaaactaagagggagagaattaagttttcaaatttgaaattgagaagcctttgaagagtggcagcgttctagaaagttccatgattgaacaagtgaagcaaaaaactagggatagactcaactgaccatctgaactccagggggattaatagccagtgctttggggcatctggctgggagccatgggtacgcaccagttgtacaagttatttcantttaatt

SEQ ID NO: 1134 - DNA, 559 bp, Homo sapiens
  Genbank Accession No. T93570
  misc_feature (1)..(559): n = a or c or g or t
gannattagaaaaagaaacagatttagcaaacagaagtctaagttgttttagtggacatttaagttcagaacaattcacaaaatggtaaaatgtgtttcttcaattctttattttatgtcaacaatttctcagctagtctacagaaaaaacagttcattcaaaatacatcttatcattcccttttcactgtttgatattctgccccttcattctcttatgttccactttctgtaatggagctcattaccgaggtggtaggggactagtttcaaaggcaacacgagtcacagaaatatcaagccagtgggtttccttcaggggcattcatatacttctcgtgttaggaaaggaaaatctttccttggggtgcagtggatatcactcctgaggaaacccaatttacttttcccaaatatctggccaatactatttttggacaggacctatttcacataggggaaacataggnatatcccatatggntaccataattttacccctattatccaccggtcccttaggccataaaccgggaaacctggatttnaaatacttttt

SEQ ID NO: 1135 - DNA, 2566 bp, Homo sapiens
  Genbank Accession No. U04313
ggcacgagttgtgctcctcgcttgcctgttccttttccacgcattttccaggataactgtgactccaggcccgcaatggatgccctgcaactagcaaattcggcttttgccgttgatctgttcaaacaactatgtgaaaaggagccactgggcaatgtcctcttctctccaatctgtctctccacctctctgtcacttgctcaagtgggtgctaaaggtgacactgcaaatgaaattggacaggttcttcattttgaaaatgtcaaagatataccctttggatttcaaacagtaacatcggatgtaaacaaacttagttccttttactcactgaaactaatcaagcggctctacgtagacaaatctctgaatctttctacagagttcatcagctctacgaagagaccctatgcaaaggaattggaaactgttgacttcaaagataaattggaagaaacgaaaggtcagatcaacaactcaattaaggatctcacagatggccactttgagaacattttagctgacaacagtgtgaacgaccagaccaaaatccttgtggttaatgctgcctactttgttggcaagtggatgaagaaatttcctgaatcagaaacaaaagaatgtcctttcagactcaacaagacagacaccaaaccagtgcagatgatgaacatggaggccacgttctgtatgggaaacattgacagtatcaattgtaagatcatagagcttccttttcaaaataagcatctcagcatgttcatcctactacccaaggatgtggaggatgagtccacaggcttggagaagattgaaaaacaactcaactcagagtcactgtcacagtggactaatcccagcaccatggccaatgccaaggtcaaactctccattccaaaatttaaggtggaaaagatgattgatcccaaggcttgtctggaaaatctagggctgaaacatatcttcagtgaagacacatctgatttctctggaatgtcagagaccaagggagtggccctatcaaatgttatccacaaagtgtgcttagaaataactgaagatggtggggattccatagaggtgccaggagcacggatcctgcagcacaaggatgaattgaatgctgaccatccctttatttacatcatcaggcacaacaaaactcgaaacatcattttctttggcaaattctgttctccttaagtggcatagcccatgttaagtcctccctgacttttctgtggatgccgatttctgtaaactctgcatccagagattcattttctagatacaataaattgctaatgttgctggatcaggaagccgccagtacttgtcatatgtagccttcacacagatagacctttttttttttccaattctatcttttgtttccttttttcccataagacaatgacatacgcttttaatgaaaaggaatcacgttagaggaaaaatatttattcattatttgtcaaattgtccggggtagttggcagaaatacagtcttccacaaagaaaattcctataaggaagatttggaagctcttcttcccagcactatgctttccttctttgggatagagaatgttccagacattctcgcttccctgaaagactgaagaaagtgtagtgcatgggacccacgaaactgccctggctccagtgaaacttgggcacatgctcaggctactataggtccagaagtccttatgttaagccctggcaggcaggtgtttattaaaattctgaattttggggattttcaaaagataatattttacatacactgtatgttatagaacttcatggatcagatctggggcagcaacctataaatcaacaccttaatatgctgcaacaaaatgtagaatattcagacaaaatggatacataaagactaagtagcccataaggggtcaaaatttgctgccaaatgcgtatgccaccaacttacaaaaacacttcgttcgcagagcttttcagattgtggaatgttggataaggaattatagacctctagtagctgaaatgcaagaccccaagaggaagttcagatcttaatataaattcactttcatttttgatagctgtcccatctggtcatgtggttggcactagactggtggcaggggcttctagctgactcgcacagggattctcacaatagccgatatcagaatttgtgttgaaggaacttgtctcttcatctaatatgatagcgggaaaaggagaggaaactactgcctttagaaaatataagtaaagtgattaaagtgctcacgttaccttgacacatagtttttcagtctatgggtttagttactttagatggcaagcatgtaacttatattaatagtaatttgtaaagttgggtggataagctatccctgttgccggttcatggattacttctctataaaaaatatatatttaccaaaaaattttgtgacattccttctcccatctcttccttgacatgcattgtaaataggttcttcttgttctgagattcaatattgaatttctcctatgctattgacaataaaatattattgaactacc

SEQ ID NO: 1136 - DNA, 1686 bp, Homo sapiens
  Genbank Accession No. U05340
ccacgcgtccgggcgtaagccaggcgtgttaaagccggtcggaactgctccggagggcacgggctccgtaggcaccaactgcaaggacccctccccctgcgggcgctcccatggcacagttcgcgttcgagagtgacctgcactcgctgcttcagctggatgcacccatccccaatgcaccccctgcgcgctggcagcgcaaagccaaggaagccgcaggcccggccccctcacccatgcgggccgccaaccgatcccacagcgccggcaggactccgggccgaactcctggcaaatccagttccaaggttcagaccactcctagcaaacctggcggtgaccgctatatcccccatcgcagtgctgcccagatggaggtggccagcttcctcctgagcaaggagaaccagtctgaaaacagccagacgcccaccaagaaggaacatcagaaagcctgggctttgaacctgaacggttttgatgtagaggaagccaagatccttcggctcagtggaaaaccacaaaatgcgccagagggttatcagaacagactgaaagtactctacagccaaaaggccactcctggctccagccggaagacctgccgttacattccttccctgccagaccgtatcctggatgcgcctgaaatccgaaatgactattacctgaaccttgtggattggagttctgggaatgtactggccgtggcactggacaacagtgtgtacctgtggagtgcaagctctggtgacatcctgcagcttttgcaaatggagcagcctggggaatatatatcctctgtggcctggatcaaagagggcaactacttggctgtgggcaccagcagtgctgaggtgcagctatgggatgtgcagcagcagaaacggcttcgaaatatgaccagtcactctgcccgagtgggctccctaagctggaacagctatatcctgtccagtggttcacgttctggccacatccaccaccatgatgttcgggtagcagaacaccatgtggccacactgagtggccacagccaggaagtgtgtgggctgcgctgggccccagatggacgacatttggccagtggtggtaatgataacttggtcaatgtgtggcctagtgctcctggagagggtggctgggttcctctgcagacattcacccagcatcaaggggctgtcaaggccgtagcatggtgtccctggcagtccaatgtcctggcaacaggagggggcaccagtgatcgacacattcgcatctggaatgtgtgctctggggcctgtctgagtgccgtggatgcccattcccaggtgtgctccatcctctggtctccccattacaaggagctcatctcaggccatggctttgcacagaaccagctagttatttggaagtacccaaccatggccaaggtggctgaactcaaaggtcacacatcccgggtcctgagtctgaccatgagcccagatggggccacagtggcatccgcagcagcagatgagaccctgaggctatggcgctgttttgagttggaccctgcgcggcggcgggagcgggagaaggccagtgcagccaaaagcagcctcatccaccaaggcatccgctgaagaccaacccatcacctcagttgttttttatttttctaataaagtcatgtctcccttcatgtttttttttttaaaa

SEQ ID NO: 1137 - DNA, 541 bp, Homo sapiens
  Genbank Accession No. U05861
tagagcagtcagaaaatgaacttcttaacatctacactagcggcagcttcctagaaatcactgcactacccgctagtaacggagtcattgccattcagagtgtgcatttttttttctctttccagttttgctggcccccctaattatccattttctgatgaatattaacatggagggcattgcatgaggtctgccagaaggccctgcgtgtggatggtgacacagaggatggctctatgctggtgactggacacatcgcctctggttaaatctctcctgcttggtgatttcagcaagctacagcaaagcccattggccagaaaggaaagacaataattttgttttttcattttgaaaaaattaaatgctctctcctaaagattcttcacctactttcgtctccataacttctatgttttctttccttctgacacactagtgcccctaaattgtgatttgcctatacgtttagggccggggttggaagatgttaacaaccatttaagattcatttctgcagtgggagtgggtggagtttcag

SEQ ID NO: 1138 - DNA, 3442 bp, Homo sapiens
  Genbank Accession No. U07919
agccggtgcgccgcagactagggcgcctcgggccagggagcgcggaggagccatggccaccgctaacggggccgtggaaaacgggcagccggacgggaagccgccggccctgccgcgccccatccgcaacctggaggtcaagttcaccaagatatttatcaacaatgaatggcacgaatccaagagtgggaaaaagtttgctacatgtaacccttcaactcgggagcaaatatgtgaagtggaagaaggagataagcccgacgtggacaaggctgtggaggctgcacaggttgccttccagaggggctcgccatggcgccggctggatgccctgagtcgtgggcggctgctgcaccagctggctgacctggtggagagggaccgcgccaccttggccgccctggagacgatggatacagggaagccatttcttcatgcttttttcatcgacctggagggctgtattagaaccctcagatactttgcagggtgggcagacaaaatccagggcaagaccatccccacagatgacaacgtcgtatgcttcaccaggcatgagcccattggtgtctgtggggccatcactccatggaacttccccctgctgatgctggtgtggaagctggcacccgccctctgctgtgggaacaccatggtcctgaagcctgcggagcagacacctctcaccgccctttatctcggctctctgatcaaagaggccgggttccctccaggagtggtgaacattgtgccaggattcgggcccacagtgggagcagcaatttcttctcaccctcagatcaacaagatcgccttcaccggctccacagaggttggaaaactggttaaagaagctgcgtcccggagcaatctgaagcgggtgacgctggagctgggggggaagaacccctgcatcgtgtgtgcggacgctgacttggacttggcagtggagtgtgcccatcagggagtgttcttcaaccaaggccagtgttgcacggcagcctccagggtgttcgtggaggagcaggtctactctgagtttgtcaggcggagcgtggagtatgccaagaaacggcccgtgggagaccccttcgatgtcaaaacagaacaggggcctcagattgatcaaaagcagttcgacaaaatcttagagctgatcgagagtgggaagaaggaaggggccaagctggaatgcgggggctcagccatggaagacaaggggctcttcatcaaacccactgtcttctcagaagtcacagacaacatgcggattgccaaagaggagattttcgggccagtgcaaccaatactgaagttcaaaagtatcgaagaagtgataaaaagagcgaatagcaccgactatggactcacagcagccgtgttcacaaaaaatctcgacaaagccctgaagttggcttctgccttagagtctggaacggtctggatcaactgctacaacgccctctatgcacaggctccatttggtggctttaaaatgtcaggaaatggcagagaactaggtgaatacgctttggccgaatacacagaagtgaaaactgtcaccatcaaacttggcgacaagaacccctgaaggaaaggcggggctccttcctcaaacatcggacggcggaatgtggcagatgaaatgtgctggaggaaaaaaatgacatttctgaccttcccgggacacattcttctggaggctttacatctactggagttgaatgattgctgttttcctctcactctcctgtttattcaccagactggggatgcctataggttgtctgtgaaatcgcagtcctgcctggggagggagctgttggccatttctgtgtttccctttaaaccagatcctggagacagtgagatactcagggcgttgttaacagggagtggtatttgaagtgtccagcagttgcttgaaatgctttgccgaatctgactccagtaagaatgtgggaaaaccccctgtgtgttctgcaagcagggctcttgcaccagcggtctcctcagggtggacctgcttacagagcaagccacgcctctttccgaggtgaaggtgggaccattccttgggaaaggattcacagtaaggttttttggtttttgttttttgttttcttgtttttaaaaaaaggatttcacagtgagaaagttttggttagtgcataccgtggaagggcgccagggtctttgtggattgcatgttgacattgaccgtgagattcggcttcaaaccaatactgcctttggaatatgacagaatcaatagcccagagagcttagtcaaagacgatatcacggtctaccttaaccaaggcactttcttaagcagaaaatattgttgaggttacctttgctgctaaagatccaatcttctaacgccacaacagcatagcaaatcctaggataattcacctcctcatttgacaaatcagagctgtaattcactttaacaaattacgcatttctatcacgttcactaacagcttatgataagtctgtgtagtcttccttttctccagttctgttacccaatttagattagtaaagcgtacacaactggaaagactgctgtaataacacagccttgttatttttaagtcctattttgatattaatttctgattagttagtaaataacacctggattctatggaggacctcggtcttcatccaagtggcctgagtatttcactggcaggttgtgaatttttcttttcctctttgggaatccaaatgatgatgtgcaatttcatgttttaacttgggaaactgaaagtgttcccatatagcttcaaaaacaaaaacaaatgtgttatccgacggatacttttatggttactaactagtactttcctaattgggaaagtagtgcttaagtttgcaaattaagttggggagggcaataataaaatgagggcccgtaacagaaccagtgtgtgtataacgaaaaccatgtataaaatgggcctatcacccttgtcagagatataaattaccacatttggcttcccttcatcagctaacacttatcacttatactaccaataacttgttaaatcaggatttggcttcatacactgaattttcagtattttatctcaagtagatatagacactaaccttgatagtgatacgttagagggttcctattcttccattgtacgataatgtctttaatatgaaatgctacattatttataattggtagagttattgtatctttttatagttgtaagtacacagaggtggtatatttaaacttctgtaatatactgtatttagaaatggaaatatatatagtgttaggtttcacttcttttaaggtttacccctgtggtgtggtttaaaaatctataggcctgggaattccgatcctagctgcagatcgcatcccacaatgcgagaatgataaaataaaattggatatttgaga

SEQ ID NO: 1139 - DNA, 2330 bp, Homo sapiens
  Genbank Accession No. U10492
aaaggaccgaggcgtgcagcggacagcagatggatcccgcggccagcagctgcatgaggagcctccagcccccagcccctgtctggggctgccttcgaaacccccactcggaaggcaatggggcctcagggctaccccactacccgcccaccccgttctccttccaccagaaaccagacttcctggcgacagcgacggcagcgtaccctgacttctcagcctcctgcctggcagccaccccacacagcctgccccaggaggagcacatcttcactgagcagcaccccgctttcccacagtcccccaactggcacttccctgtctcagacgcccggcgcaggcccaactcaggcccggcagggggttccaaggaaatggggaccagcagcctgggcctggtggacaccacaggaggcccaggcgatgactacggggtgcttgggagcactgccaatgagacagagaagaaatcatccaggcggagaaaggagagttcagacaaccaggagaacagagggaagccggagggcagcagcaaagcccgcaaggagaggacggccttcaccaaggagcagctgcgagagctggaggcagagtttgcccatcataactacctgactcggctccgcagatatgagattgcggtaaacctggacctctctgagcgccaggtcaaagtgtggttccagaaccgaaggatgaagtggaagcgtgtgaagggaggtcagcccatctcccccaatgggcaggaccctgaggatggggactccacagcctctccaagttcagagtgagattctgcatggaggaaaaatgactaaggactgagccccctacccaactacccccaccccaatcccaccttcaccctcttccttccccagccagggcagcctctccacatctttccctgactcttggatatgaaactgcccagcattcctgggagtcttaggattttctaggaagttctgtccagcctcttagcagcctcttccctagggcctttgctcccacactctcatggaatcagacagagatcctaccgggccggatgaatctggaaacagcttcagagatactgcttctcagcgtctcttggctgccacccatgcctcctcctaccgctgttctcctaggtcagccaggcctcctcctggtctggacaccacctggcctggtgggagaggagctttggaaccagctggcgactcggaaagtaaatgcttcaaaaggaaggaaatgacagagacacacgcccttgcccaccttcctctgtaggctgcacatctgaggctttggggccccttagttgtcccgaaaccccaagaaaaatcagaatgaggagagtcaaggacagcaactcagctgctgcaagccagaaacacatccctgtctccaaatttgttggctaagtggagacacttctgagaactgactagagaagacaagaaaatagcccgatgtaggtttcggtgtccccatataggccccgtccacacaggcttgactgggtggacaagaatgaacccatgacagcacctgctgcttcaaaatcaaaatcaatttagggatacagcaggggctgttgggctgtgctccagagaaaaggagcagctactccttttaaatccacgatttctggattgaaaacctgtccagatgctgagttgttgggctgaacaactaggagctgaaaacaacgtagaggctggaaagtgtcccctgcattctggaggggaggggagataataaggagggctgctgggtgagggcctggagatgtggaaccctggagtggaaggtttctccagtgacagtgtcctgtgacwgcaaaagggrasaagaaaatccctcttcctccatgggatggatttaagctcttgctgtgtgttctacaaatgctgttattgtgggaggaaatgctaggtttttgtgtgtggactgcccagacctcagccaggtcttctggagatgacatttgaggactgatggccaaagagcatgggggactgaagccctggctgcctcagcgctctgtctcccaacaccagctggtgttgcagagggaggtcaacgtgagtttggatctcttgtacgcagatgtaatcattcacatgtaaaaataaccccacctccccaccccaaaaagggcaagagctgtggaaaatgattgccaaatgagatggctggttagagcatgattttttctaaagcatacttcatatattttcttaagattacatcaagctaattgtgcgagctcaattcactttgtaagaaaactctcggagaaataaaatcaataaaaagccaaaaaaaaaaataag

SEQ ID NO: 1140 - DNA, 1553 bp, Homo sapiens
  Genbank Accession No. U15979
tctaaaggaggtggagagcgcaccgcagcccggtgcagcccggtgcagccctggctttcccctcgctgcggcccgtgccccctttcgcgtccgcaaccagaagcccagtgcggcgccaggagccggacccgcgcccgcaccgctcccgggaccgcgaccccggccgcccagagatgaccgcgaccgaagccctcctgcgcgtcctcttgctcctgctggctttcggccacagcacctatggggctgaatgcttcccggcctgcaacccccaaaatggattctgcgaggatgacaatgtttgcaggtgccagcctggctggcagggtcccctttgtgaccagtgcgtgacctctcccggctgccttcacggactctgtggagaacccgggcagtgcatttgcaccgacggctgggacggggagctctgtgatagagatgttcgggcctgctcctcggccccctgtgccaacaacgggacctgcgtgagcctggacggtggcctctatgaatgctcctgtgcccccgggtactcgggaaaggactgccagaaaaaggacgggccctgtgtgatcaacggctccccctgccagcacggaggcacctgcgtggatgatgagggccgggcctcccatgcctcctgcctgtgcccccctggcttctcaggcaatttctgcgagatcgtggccaacagctgcacccccaacccatgcgagaacgacggcgtctgcactgacattgggggcgacttccgctgccggtgcccagccggcttcatcgacaagacctgcagccgcccggtgaccaactgcgccagcagcccgtgccagaacgggggcacctgcctgcagcacacccaggtgagctacgagtgtctgtgcaagcccgagttcacaggtctcacctgtgtcaagaagcgcgcgctgagcccccagcaggtcacccgtctgcccagcggctatgggctggcctaccgcctgacccctggggtgcacgagctgccggtgcagcagccggagcaccgcatcctgaaggtgtccatgaaagagctcaacaagaaaacccctctcctcaccgagggccaggccatctgcttcaccatcctgggcgtgctcaccagcctggtggtgctgggcactgtgggtatcgtcttcctcaacaagtgcgagacctgggtgtccaacctgcgctacaaccacatgctgcggaagaagaacctgctgcttcagtacaacagcggggaggacctggccgtcaacatcatcttccccgagaagatcgacatgaccaccttcagcaaggaggccggcgacgaggagatctaagcagcgttcccacagccccctctagattcttggagttccgcagagcttactatacgcggtctgtcctaatctttgtggtgttcgctatctcttgtgtcaaatctggtgaacgctacgcttacatatattgtctttgtgctgctgtgtgacaaacgcaatgcaaaaacaatcctctttctctctcttaatgcatgatacagaataataataagaatttcatctttaaatgag

SEQ ID NO: 1141 - DNA, 577 bp, Homo sapiens
  Genbank Accession No. U17760
caccactgctttagaggccagatttttctggaggggattcctctacacatgctacctccagttagcaggaggggaaggaagggttgggagtcttggggagtctcaccatcaactcctcctcctgctgctgttccatttgcctcagacatggagttggagctgctgcggggcagccaggccatcatgctgcgctcagcggacctgacaggactggagaagcgtgtggagcagatccgtgaccacatcaatgggcgcgtgctctactatgccacctgcaagtgatgctacagcttccagcccgttgccccactcatctgccgcctttgcttttggttggggggcagattgggttggaatgctttccatctccaggagactttcatgtagcccaaagtacagcctggaccacccctggtgtgtacctagtaagattaccctgagctgcagctgagcctgagccaatgggacagttacacttgacagacaaagatggtggagattggcatgccattgaaactaagagctctcaagtcaaggaagctgggctgggcagtatcccccgcctttagttctccac

SEQ ID NO: 1142 - DNA, 2244 bp, Homo sapiens
  Genbank Accession No. U19495
gcacgggacaggccgggccacacccaccggggcgagctcggagggcggcgctctgggcggagggcccggcggctcggcccagggcgcgttacctcgtcgccggggccggagagggcgggcggaggcacggggcctggaggcgccaggcggaggatgcgggcgacacggtggcggcggcgaccgcgcgaccgggcgggcgggcgggcaggggcgagcggagggagggagcggactgcggcaggatctgtcgaggaaaaatcttgcggccggcgattccccgccttttaagcgcagcctgcactccccccaccccacgcaggggcgggccttccccaacgcgggcgcccactggccgccgcgcgccgctcccctccagctcgcctgcgcctctcactctccgtcagccgcattgcccgctcggcgtccggcccccgacccgcgctcgtccgcccgcccgcccgcccgcccgcgccatgaacgccaaggtcgtggtcgtgctggtcctcgtgctgaccgcgctctgcctcagcgacgggaagcccgtcagcctgagctacagatgcccatgccgattcttcgaaagccatgttgccagagccaacgtcaagcatctcaaaattctcaacactccaaactgtgcccttcagattgtagcccggctgaagaacaacaacagacaagtgtgcattgacccgaagctaaagtggattcaggagtacctggagaaagctttaaacaagtaagcacaacagccaaaaaggactttccgctagacccactcgaggaaaactaaaaccttgtgagagatgaaagggcaaagacgtgggggagggggccttaaccatgaggaccaggtgtgtgtgtggggtgggcacattgatctgggatcgggcctgaggtttgccagcatttagaccctgcatttatagcatacggtatgatattgcagcttatattcatccatgccctgtacctgtgcacgttggaatttttattactggggtttttctaagaaagaaattgtattatcaacagcattttcaagcagttagttccttcatgatcatcacaatcatcatcattctcattctcattttttaaatcaacgagtacttcaagatctgaatttggcttgtttggagcatctcctctgctcccctggggagtctgggcacagtcaggtggtggcttaacagggagctggaaaaagtgtcctttcttcagacactgaggctcccgcagcagcgcccctcccaagaggaaggcctctgtggcactcagataccgactggggctgggcgccgccactgccttcacctcctctttcaacctcagtgattggctctgtgggctccatgtagaagccactattactgggactgtgctcagagacccctctcccagctattcctactctctccccgactccgagagcatgcattaatcttgcttctgcttctcatttctgtagcctgatcagcgccgcaccagccgggaagagggtgattgctggggctcgtgccctgcatccctctcctcccagggcctgccccacagctcgggccctctgtgagatccgtctttggcctcctccagaatggagctggccctctcctggggatgtgtaatggtccccctgcttacccgcaaaagacaagtctttacagaatcaaatgcaattttaaatctgagagctcgctttgagtgactgggttttgtgattgcctctgaagcctatgtatgccatggaggcactaacaaactctgaggtttccgaaatcagaagcgaaaaaatcagtgaataaaccatcatcttgccactaccccctcctgaagccacagcagggtttcaggttccaatcagaactgttggcaaggtgacatttccatgcataaatgcgatccacagaaggtcctggtggtatttgtaactttttgcaaggcatttttttatatatatttttgtgcacatttttttttacgtttctttagaaaacaaatgtatttcaaaatatatttatagtcgaacaattcatatatttgaagtggagccatatgaatgtcagtagtttatacttctctattatctcaaactactggcaatttgtaaagaaatatatatgatatataaatgtgattgcagcttttcaatgttagccacagtgtattttttcacttgtactaaaattgtatcaaatgtgacattatatgcactagcaataaaatgctaattgtttcatggta

SEQ ID NO: 1143 - DNA, 1511 bp, Homo sapiens
  Genbank Accession No. U22398
gaattccgggcacccctcgagcgagcgagctagccagcaggcatcgagggggcgcggctgccgtccggacgagacaggcgaacccgacgcagaagagtccaccaccggacagtcaggtagccgccgcgtccctcgcacacgcagagtcgggcggcgcggggtctcccttgcgcccggcctccgccctctcctcctctcctttccccttcttctcgctgtcctctcctctctcgctgcccgcgtttgcgcagccccgggccatgtccgacgcgtccctccgcagcacatccacgatggagcgtcttgtcgcccgtgggaccttcccagtactagtgcgcaccagcgcctgccgcagcctcttcgggccggtggaccacgaggagctgagccgcgagctgcaggcccgcctggccgagctgaacgccgaggaccagaaccgctgggattacgacttccagcaggacatgccgctgcggggccctggacgcctgcagtggaccgaagtggacagcgactcggtgcccgcgttctaccgcgagacggtgcaggtggggcgctgccgcctgctgctggcgccgcggcccgtcgcggtcgcggtggctgtcagcccgcccctcgagccggccgctgagtccctcgacggcctcgaggaggcgccggagcagctgcctagtgtcccggtcccggccccggcgtccaccccgcccccagtcccggtcctggctccagccccggccccggctccggctccggtcgcggctccggtcgcggctccggtcgcggtcgcggtcctggccccggccccggccccggccccggctccggctccggccccggctccagtcgcggccccggccccagccccggccccggccccggccccggcccccgccccggccccggccccggacgcggcgcctcaagagagcgccgagcagggcgcgaaccaggggcagcgcggccaggagcctctcgctgaccagctgcactcggggatttcgggacgtcccgcggccggcaccgcggccgccagcgccaacggcgcggcgatcaagaagctgtccgggcctctgatctccgatttcttcgccaagcgcaagagatcagcgcctgagaagtcgtcgggcgatgtccccgcgccgtgtccctctccaagcgccgcccctggcgtgggctcggtggagcagaccccgcgcaagaggctgcggtgagccaatttagagcccaaagagccccgagggaacctgccggggcagcggacgttggaagggcgctgggcctcggctgggaccgttcatgtagcagcaaccggcggcggctgccgcagagcagcgttcggttttgtttttaaattttgaaaactgtgcaatgtattaataacgtctttttatatctaaatgtattctgcacgagaaggtacactggtcccaaagtgtaaagctttaagagtcatttatataaaatgtttaatctctgctgaaactcagtacaaaaaaaccgggattccggcc

SEQ ID NO: 1144 - DNA, 10211 bp, Homo sapiens
  Genbank Accession No. U30872
gagaggtcgttttcccgtccccgagagcaagtttatttacaaatgttggagtaataaagaaggcagaacaaaatgagctgggctttggaagaatggaaagaagggctgcctacaagagctcttcagaaaattcaagagcttgaaggacagcttgacaaactgaagaaggaaaagcagcaaaggcagtttcagcttgacagtctcgaggctgcgcctcagaagcaaacacagaaggttgaaaatgaaaaaaccgagggtacaaacctgaaaagggagaatcaaagattgatggaaatatgtgaaagtctggagaaaactaagcagaagatttctcatgaacttcaagtcaaggagtcacaagtgaatttccaggaaggacaactgaattcaggcaaaaaacaaatagaaaaactggaacaggaacttaaaaggtgtaaatctgagcttgaaagaagccaacaagctgcgcagtctgcagatgtctctctgaatccatgcaatacaccacaaaaaatttttacaactccactaacaccaagtcaatattatagtggttccaagtatgaagatctaaaagaaaaatataataaagaggttgaagaacgaaaaagattagaggcagaggttaaagccttgcaggctaaaaaagcaagccagactcttccacaagccaccatgaatcaccgcgacattgcccggcatcaggcttcatcatctgtgttctcatggcagcaagagaagaccccaagtcatctttcatctaattctcaaagaactccaattaggagagatttctctgcatcttacttttctggggaacaagaggtgactccaagtcgatcaactttgcaaatagggaaaagagatgctaatagcagtttctttgacaattctagcagtcctcatcttttggatcaattaaaagcgcagaatcaagagctaagaaacaagattaatgagttggaactacgcctgcaaggacatgaaaaagaaatgaaaggccaagtgaataagtttcaagaactccaactccaactggagaaagcaaaagtggaattaattgaaaaagagaaagttttgaacaaatgtagggatgaactagtgagaacaacagcacaatacgaccaggcgtcaaccaagtatactgcattggaacaaaaactgaaaaaattgacggaagatttgagttgtcagcgacaaaatgcagaaagtgccagatgttctctggaacagaaaattaaggaaaaagaaaaggagtttcaagaggagctctcccgtcaacagcgttctttccaaacactggaccaggagtgcatccagatgaaggccagactcacccaggagttacagcaagccaagaatatgcacaacgtcctgcaggctgaactggataaactcacatcagtaaagcaacagctagaaaacaatttggaagagtttaagcaaaagttgtgcagagctgaacaggcgttccaggcgagtcagatcaaggagaatgagctgaggagaagcatggaggaaatgaagaaggaaaacaacctccttaagagtcactctgagcaaaaggccagagaagtctgccacctggaggcagaactcaagaacatcaaacagtgtttaaatcagagccagaattttgcagaagaaatgaaagcgaagaatacctctcaggaaaccatgttaagagatcttcaagaaaaaataaatcagcaagaaaactccttgactttagaaaaactgaagcttgctgtggctgatctggaaaagcagcgagattgttctcaagaccttttgaagaaaagagaacatcacattgaacaacttaatgataagttaagcaagacagagaaagagtccaaagccttgctgagtgctttagagttaaaaaagaaagaatatgaattgaaagaagagaaaactctgttttcttgttggaaaagtgaaaacgaaaaacttttaactcagatggaatcagaaaaggaaaacttgcagagtaaaattaatcacttggaaacttgtctgaagacacagcaaataaaaagtcatgaatacaacgagagagtaagaacgctggagatggacagagaaaacctaagtgtcgagatcagaaaccttcacaacgtgttagacagtaagtcagtggaggtagagacccagaaactagcttatatggagctacagcagaaagctgagttctcagatcagaaacatcagaaggaaatagaaaatatgtgtttgaagacttctcagcttactgggcaagttgaagatctagaacacaagcttcagttactgtcaaatgaaataatggacaaagaccggtgttaccaagacttgcatgccgaatatgagagcctcagggatctgctaaaatccaaagatgcttctctggtgacaaatgaagatcatcagagaagtcttttggcttttgatcagcagcctgccatgcatcattcctttgcaaatataattggagaacaaggaagcatgccttcagagaggagtgaatgtcgtttagaagcagaccaaagtccgaaaaattctgccatcctacaaaatagagttgattcacttgaattttcattagagtctcaaaaacagatgaactcagacctgcaaaagcagtgtgaagagttggtgcaaatcaaaggagaaatagaagaaaatctcatgaaagcagaacagatgcatcaaagttttgtggctgaaacaagtcagcgcattagtaagttacaggaagacacttctgctcaccagaatgttgttgctgaaaccttaagtgcccttgagaacaaggaaaaagagctgcaacttttaaatgataaggtagaaactgagcaggcagagattcaagaattaaaaaagagcaaccatctacttgaagactctctaaaggagctacaacttttatccgaaaccctaagcttggagaagaaagaaatgagttccatcatttctctaaataaaagggaaattgaagagctgacccaagagaatgggactcttaaggaaattaatgcatccttaaatcaagagaagatgaacttaatccagaaaagtgagagttttgcaaactatatagatgaaagggagaaaagcatttcagagttatctgatcagtacaagcaagaaaaacttattttactacaaagatgtgaagaaaccggaaatgcatatgaggatcttagtcaaaaatacaaagcagcacaggaaaagaattctaaattagaatgcttgctaaatgaatgcactagtctttgtgaaaataggaaaaatgagttggaacagctaaaggaagcatttgcaaaggaacaccaagaattcttaacaaaattagcatttgctgaagaaagaaatcagaatctgatgctagagttggagacagtgcagcaagctctgagatctgagatgacagataaccaaaacaattctaagagcgaggctggtggtttaaagcaagaaatcatgactttaaaggaagaacaaaacaaaatgcaaaaggaagttaatgacttattacaagagaatgaacagctgatgaaggtaatgaagactaaacatgaatgtcaaaatctagaatcagaaccaattaggaactctgtgaaagaaagagagagtgagagaaatcaatgtaattttaaacctcagatggatcttgaagttaaagaaatttctctagatagttataatgcgcagttggtgcaattagaagctatgctaagaaataaggaattaaaacttcaggaaagtgagaaggagaaggagtgcctgcagcatgaattacagacaattagaggagatcttgaaaccagcaatttgcaagacatgcagtcacaagaaattagtggccttaaagactgtgaaatagatgcggaagaaaagtatatttcagggcctcatgagttgtcaacaagtcaaaacgacaatgcacaccttcagtgctctctgcaaacaacaatgaacaagctgaatgagctagagaaaatatgtgaaatactgcaggctgaaaagtatgaactcgtaactgagctgaatgattcaaggtcagaatgtatcacagcaactaggaaaatggcagaagaggtagggaaactactaaatgaagttaaaatattaaatgatgacagtggtcttctccatggtgagttagtggaagacataccaggaggtgaatttggtgaacaaccaaatgaacagcaccctgtgtctttggctccattggacgagagtaattcctacgagcacttgacattgtcagacaaagaagttcaaatgcactttgccgaattgcaagagaaattcttatctttacaaagtgaacacaaaattttacatgatcagcactgtcagatgagctctaaaatgtcagagctgcagacctatgttgactcattaaaggccgaaaatttggtcttgtcaacgaatctgagaaactttcaaggtgacttggtgaaggagatgcagctgggcttggaggaggggctcgttccatccctgtcatcctcttgtgtgcctgacagctctagtcttagcagtttgggagactcctccttttacagagctcttttagaacagacaggagatatgtctcttttgagtaatttagaaggggctgtttcagcaaaccagtgcagtgtagatgaagtattttgcagcagtctgcaggaggagaatctgaccaggaaagaaaccccttcggccccagcgaagggtgttgaagagcttgagtccctctgtgaggtgtaccggcagtccctcgagaagctagaagagaaaatggaaagtcaagggattatgaaaaataaggaaattcaagagctcgagcagttattaagttctgaaaggcaagagcttgactgccttaggaagcagtatttgtcagaaaatgaacagtggcaacagaagctgacaagcgtgactctggagatggagtccaagttggcggcagaaaagaaacagacggaacaactgtcacttgagctggaagtagcacgactccagctacaaggtctggacttaagttctcggtctttgcttggcatcgacacagaagatgctattcaaggccgaaatgagagctgtgacatatcaaaagaacatacttcagaaactacagaaagaacaccaaagcatgatgttcatcagatttgtgataaagatgctcagcaggacctcaatctagacattgagaaaataactgagactggtgcattgaaacccacaggagagtgctctggggaacagtccccagataccaattatgagcctccaggggaagataaaacccagggctcttcagaatgcatttctgaattgtcattttctggtcctaatgctttggtacctatggatttcctggggaatcaggaagatatccataatcttcaactgcgggtaaaagagacatcaaatgagaatttgagattacttcatgtgatagaggaccgtgacagaaaagttgaaagtttgctaaatgaaatgaaagaattagactcaaaactccatttacaggaggtacaactaatgaccaaaattgaagcatgcatagaattggaaaaaatagttggggaacttaagaaagaaaactcagatttaagtgaaaaattggaatatttttcttgtgatcaccaggagttactccagagagtagaaacttctgaaggcctcaattctgatttagaaatgcatgcagataaatcatcacgtgaagatattggagataatgtggccaaggtgaatgacagctggaaggagagatttcttgatgtggaaaatgagctgagtaggatcagatcggagaaagctagcattgagcatgaagccctctacctggaggctgacttagaggtagttcaaacagagaagctatgtttagaaaaagacaatgaaaataagcagaaggttattgtctgccttgaagaagaactctcagtggtcacaagtgagagaaaccagcttcgtggagaattagatactatgtcaaaaaaaaccacggcactggatcagttgtctgaaaaaatgaaggagaaaacacaagagcttgagtctcatcaaagtgagtgtctccattgcattcaggtggcagaggcagaggtgaaggaaaagacggaactccttcagactttgtcctctgatgtgagtgagctgttaaaagacaaaactcatctccaggaaaagctgcagagtttggaaaaggactcacaggcactgtctttgacaaaatgtgagctggaaaaccaaattgcacaactgaataaagagaaagaattgcttgtcaaggaatctgaaagcctgcaggccagactgagtgaatcagattatgaaaagctgaatgtctccaaggccttggaggccgcactggtggagaaaggtgagttcgcattgaggctgagctcaacacaggaggaagtgcatcagctgagaagaggcatcgagaaactgagagttcgcattgaggccgatgaaaagaagcagctgcacatcgcagagaaactgaaagaacgcgagcgggagaatgattcacttaaggataaagttgagaaccttgaaagggaattgcagatgtcagaagaaaaccaggagctagtgattcttgatgccgagaattccaaagcagaagtagagactctaaaaacacaaatagaagagatggccagaagcctgaaagtttttgaattagaccttgtcacgttaaggtctgaaaaagaaaatctgacaaaacaaatacaagaaaaacaaggtcagttgtcagaactagacaagttactctcttcatttaaaagtctgttagaagaaaaggagcaagcagagatacagatcaaagaagaatctaaaactgcagtggagatgcttcagaatcagttaaaggagctaaatgaggcagtagcagccttgtgtggtgaccaagaaattatgaaggccacagaacagagtctagacccaccaatagaggaagagcatcagctgagaaatagcattgaaaagctgagagcccgcctagaagctgatgaaaagaagcagctctgtgtcttacaacaactgaaggaaagtgagcatcatgcagatttacttaagggtagagtggagaaccttgaaagagagctagagatagccaggacaaaccaagagcatgcagctcttgaggcagagaattccaaaggagaggtagagaccctaaaagcaaaaatagaagggatgacccaaagtctgagaggtctggaattagatgttgttactataaggtcagaaaaagaaaatctgacaaatgaattacaaaaagagcaagagcgaatatctgaattagaaataataaattcatcatttgaaaatattttgcaagaaaaagagcaagagaaagtacagatgaaagaaaaatcaagcactgccatggagatgcttcaaacacaattaaaagagctcaatgagagagtggcagccctgcataatgaccaagaagcctgtaaggccaaagagcagaatcttagtagtcaagtagagtgtcttgaacttgagaaggctcagttgctacaaggccttgatgaggccaaaaataattatattgttttgcaatcttcagtgaatggcctcattcaagaagtagaagatggcaagcagaaactggagaagaaggatgaagaaatcagtagactgaaaaatcaaattcaagaccaagagcagcttgtctctaaactgtcccaggtggaaggagagcaccaactttggaaggagcaaaacttagaactgagaaatctgacagtggaattggagcagaagatccaagtgctacaatccaaaaatgcctctttgcaggacacattagaagtgctgcagagttcttacaagaatctagagaatgagcttgaattgacaaaaatggacaaaatgtcctttgttgaaaaagtaaacaaaatgactgcaaaggaaactgagctgcagagggaaatgcatgagatggcacagaaaacagcagagctgcaagaagaactcagtggagagaaaaataggctagctggagagttgcagttactgttggaagaaataaagagcagcaaagatcaattgaaggagctcacactagaaaatagtgaattgaagaagagcctagattgcatgcacaaagaccaggtggaaaaggaagggaaagtgagagaggaaatagctgaatatcagctacggcttcatgaagctgaaaagaaacaccaggctttgcttttggacacaaacaaacagtatgaagtagaaatccagacataccgagagaaattgacttctaaagaagaatgtctcagttcacagaagctggagatagaccttttaaagtctagtaaagaagagctcaataattcattgaaagctactactcagattttggaagaattgaagaaaaccaagatggacaatctaaaatatgtaaatcagttgaagaaggaaaatgaacgtgcccaggggaaaatgaagttgttgatcaaatcctgtaaacagctggaagaggaaaaggagatactgcagaaagaactctctcaacttcaagctgcacaggagaagcagaaaacaggtactgttatggataccaaggtcgatgaattaacaactgagatcaaagaactgaaagaaactcttgaagaaaaaaccaaggaggcagatgaatacttggataagtactgttccttgcttataagccatgaaaagttagagaaagctaaagagatgttagagacacaagtggcccatctgtgttcacagcaatctaaacaagattcccgagggtctcctttgctaggtccagttgttccaggaccatctccaatcccttctgttactgaaaagaggttatcatctggccaaaataaagcttcaggcaagaggcaaagatccagtggaatatgggagaatggtggaggaccaacacctgctaccccagagagcttttctaaaaaaagcaagaaagcagtcatgagtggtattcaccctgcagaagacacggaaggtactgagtttgagccagagggacttccagaagttgtaaagaaagggtttgctgacatcccgacaggaaagactagcccatatatcctgcgaagaacaaccatggcaactcggaccagcccccgcctggctgcacagaagttagcgctatccccactgagtctcggcaaagaaaatcttgcagagtcctccaaaccaacagctggtggcagcagatcacaaaaggtcaaagttgctcagcggagcccagtagattcaggcaccatcctccgagaacccaccacgaaatccgtcccagtcaataatcttcctgagagaagtccgactgacagccccagagagggcctgagggtcaagcgaggccgacttgtccccagccccaaagctggactggagtccaagggcagtgagaactgtaaggtccagtgaaggcactttgtgtgtcagtacccctgggaggtgccagtcattgaatagataaggctgtgcctacaggacttctctttagtcagggcatgctttattagtgaggagaaaacaattccttagaagtcttaaatatattgtactctttagatctcccatgtgtaggtattgaaaaagtttggaagcactgatcacctgttagcattgccattcctctactgcaatgtaaatagtataaagctatgtatataaagctttttggtaatatgttacaattaaaatgacaagcactatatcacaatctctgtttgtatgtgggttttacactaaaaaaatgcaaaacacattttattcttctaattaacagctcctaggaaaatgtagacttttgctttatgatattctatctgtagtatgaggcatggaatagttttgtatcgggaatttctcagagctgagtaaaatgaaggaaaagcatgttatgtgtttttaaggaaaatgtgcacacatatacatgtaggagtgtttatctttctcttacaatctgttttagacatctttgcttatgaaacctgtacatatgtgtgtgtgggtatgtgtttatttccagtgagggctgcaggcttcctagaggtgtgctataccatgcgtctgtcgttgtgcttttttctgtttttagaccaattttttacagttctttggtaagcattgtcgtatctggtgatggattaacatatagcctttgttttctaataaaatagtcgccttcgttttctgtaaaaaaaaaaaaaaaaaaaaaa

SEQ ID NO: 1145 - DNA, 622 bp, Homo sapiens
  Genbank Accession No. U31384
ggcacgagctcgtgccggccttcagttgtttcgggacgcgccgagcttcgccgctcttccagcggctccgctgccagagctagcccgagcccggttctggggcgaaaatgcctgcccttcacatcgaagatttgccagagaaggaaaaactgaaaatggaagttgagcagcttcgcaaagaagtgaagttgcagagacaacaagtgtctaaatgttctgaagaaataaagaactatattgaagaacgttctggagaggatcctctagtaaagggaattccagaagacaagaacccctttaaagaaaaaggcagctgtgttatttcataaataacttgggagaaactgcatcctaagtggaagaactagtttgttttagttttcccagataaaaccaacatgctttttaaggaaggaagaatgaaattaaaaggagactttcttaagcaccatatagatagggttatgtataaaagcatatgtgctactcatctttgctcactatgcagtcttttttaagagagcagagagtatcagatgtacaattatggaaataagaacattacttgagcatgacacttctttcagtatattgcttgatgcttcaaataaagttttgtctt

SEQ ID NO: 1146 - DNA, 503 bp, Homo sapiens
  Genbank Accession No. U33147
gacagcggcttccttgatccttgccacccgcgactgaacaccgacagcagcagcctcaccatgaagttgctgatggtcctcatgctggcggccctctcccagcactgctacgcaggctctggctgccccttattggagaatgtgatttccaagacaatcaatccacaagtgtctaagactgaatacaaagaacttcttcaagagttcatagacgacaatgccactacaaatgccatagatgaattgaaggaatgttttcttaaccaaacggatgaaactctgagcaatgttgaggtgtttatgcaattaatatatgacagcagtctttgtgatttattttaactttctgcaagacctttggctcacagaactgcagggtatggtgagaaaccaactacggattgctgcaaaccacaccttctctttcttatgtctttttactacaaactacaagacaattgttgaaacctgctatacatgtttattttaataaattgatggca

SEQ ID NO: 1147 - DNA, 1592 bp, Homo sapiens
  Genbank Accession No. U35139
ggcacgagtcgaagagctcctggacgcagaggccctgcccttgccagacggcgcagacatgtcagaacaaagtaaggatctgagcgaccctaactttgcagccgaggcccccaactccgaggtgcacagcagccctggggtttcggagggggttcctccgtccgcgaccctggcagagccgcagagccctcctctaggcccgacggccgctccgcaggccgcgccgcctccccaggccccgaacgacgagggcgacccgaaggccctgcagcaggctgcggaggagggccgcgcccaccaggccccgagcgcggcccagccgggcccggcaccgccagccccggcgcagctggtgcagaaggcgcacgagctcatgtggtacgtgctggtcaaggaccagaagaagatgatcatctggtttccagacatggtgaaagatgtcatcggcagctacaagaagtggtgcaggagcatcctccggcgcaccagcctcatcctcgcccgggtgttcgggctgcacctgaggctaaccagcctgcacaccatggagtttgcgctggtcaaagcgctggagcccgaggagctggacagggtggcgctgagcaaccgcatgcccatgacaggcctcctgctcatgatcctgagcctcatctacgtgaagggccgcggcgccagagagagcgccgtctggaacgtgctgcgcatcctggggctgcggccctggaagaagcactccaccttcggggacgtgcggaagctcatcactgaggagttcgtccaaatgaattacctgaagtaccagcgcgtcccatacgtggagccgcccgaatacgagttcttttggggctcccgggccagccgcgaaatcaccaagatgcaaatcatggagttcctggccagggtctttaagaaagacccccaggcctggccctcccgatacagagaagctctggaggaggccagagctctgcgggaggctaatcccactgcccactaccctcgcagcagtgtctctgaggactagcaaagtctggaggcagatgaatggtttctgaccctcaccagggctgtggaagggtgggggtgggtcattatagtattcaggatttacagtgcagtattcacgtgtaacttttaagttttcagtacagtgcttttatacctttaatgcaatgttgtattcatttgggtactattgtgtagtatttaggatgtatgcatgtttgtttatatgtaagcttggttggtgctttcgcttttgtgctacctttcttggatttttgtaccagagatgtgctaaactgatgaaatacattgagaaagtttccatcttattcttttatatgggactgatgatgtgtgttggggtagactgctcctgcagagtttggaagaagtcaccagcaaagccggcctaaccaagaaaagtcaaggcccttcatgaccttgctgggcacagaaaacaccctcgtggagtacactaatttgaactggactggtctcagtgtgagcacttggcacactttactaaacacatatacaaccccaccgtgagtcaactttaaagtaaacattaaagattcttgtgatac

SEQ ID NO: 1148 - DNA, 4040 bp, Homo sapiens
  Genbank Accession No. U39447
gtccttcccacccttagtcccaggcatctgactaccgggaacctcagccagagtccgggagccccccaccccgtccaggagccaacagagcccccgtcttgctggcgtgagaatacattgctctcctttggttgaatcagctgtccctcttcgtgggaaaatgaaccagaagacaatcctcgtgctcctcattctggccgtcatcaccatctttgccttggtttgtgtcctgctggtgggcaggggtggagatgggggtgaacccagccagcttccccattgcccctctgtatctcccagtgcccagccttggacacaccctggccagagccagctgtttgcagacctgagccgagaggagctgacggctgtgatgcgctttctgacccagcggctggggccagggctggtggatgcagcccaggcccggccctcggacaactgtgtcttctcagtggagttgcagctgcctcccaaggctgcagccctggctcacttggacagggggagccccccacctgcccgggaggcactggccatcgtcttctttggcaggcaaccccagcccaacgtgagtgagctggtggtggggccactgcctcacccctcctacatgcgggacgtgactgtggagcgtcatggaggccccctgccctatcaccgacgccccgtgctgttccaagagtacctggacatagaccagatgatcttcaacagagagctgccccaggcttctgggcttctccaccactgttgcttctacaagcaccggggacggaacctggtgacaatgaccacggctccccgtggtctgcaatcaggggaccgggccacctggtttggcctctactacaacatctcgggcgctgggttcttcctgcaccacgtgggcttggagctgctagtgaaccacaaggcccttgaccctgcccgctggactatccagaaggtgttctatcaaggccgctactacgacagcctggcccagctggaggcccagtttgaggccggcctggtgaatgtggtgctgatcccagacaatggcacaggtgggtcctggtccctgaagtcccctgtgcccccgggtccagctccccctctacagttctatccccaaggcccccgcttcagtgtccagggaagtcgagtggcctcctcactgtggactttctcctttggcctcggagcattcagtggcccaaggatctttgacgttcgcttccaaggagaaagactagtttatgagataagcctccaagaggccttggccatctatggtggaaattccccagcagcaatgacgacccgctatgtggatggaggctttggcatgggcaagtacaccacgcccctgacccgtggggtggactgcccctacttggccacctacgtggactggcacttccttttggagtcccaggcccccaagacaatacgtgatgccttttgtgtgtttgaacagaaccagggcctccccctgcggcgacaccactcagatctctactcgcactactttgggggtcttgcggaaacggtgctggtcgtcagatctatgtccaccttgctcaactatgactatgtgtgggatacggtcttccaccccagtggggccatagaaatacgattctatgccacgggctacatcagctcggcattcctctttggtgctactgggaagtacgggaaccaagtgtcagagcacaccctgggcacggtccacacccacagcgcccacttcaaggtggatctggatgtagcaggactggagaactgggtctgggccgaggatatggtctttgtccccatggctgtgccctggagccctgagcaccagctgcagaggctgcaggtgacccggaagctgctggagatggaggagcaggccgccttcctcgtgggaagcgccacccctcgctacctgtacctggccagcaaccacagcaacaagtggggtcacccccggggctaccgcatccagatgctcagctttgctggagagccgctgccccaaaacagctccatggcgagaggcttcagctgggagaggtaccagctggctgtgacccagcggaaggaggaggagcccagtagcagcagcgttttcaatcagaatgacccttgggcccccactgtggatttcagtgacttcatcaacaatgagaccattgctggaaaggatttggtggcctgggtgacagctggttttctgcatatcccacatgcagaggacattcctaacacagtgactgtggggaacggcgtgggcttcttcctccgaccctataacttctttgacgaagacccctccttctactctgccgactccatctacttccgaggggaccaggatgctggggcctgcgaggtcaaccccctagcttgcctgccccaggctgctgcctgtgcccccgacctccctgccttctcccacgggggcttctctcacaactaggcggtcctgggatggggcatgtggccaagggctccagggccagggtgtgagggatggggagcagctgggcactgggccggcagcctggttccctctttcctgtgccaggactctctttcttccactaccctccctcgcatccgcctctgagccaggagcctcctgaccctgtgatgcctgacacaggggacactgaaccttgttgatgccagctgtactgagttctcatccacagaggccaggcatggcccagcctggagccgtggccgagggcttccctagatggttccctttgttgctgtctggctttcccgaatctttttaggccacctccaaggactctaaaagggggctattccctggagaccccagagtagggttgccagtcctgcaagtccatagctgagctggaaaggatgcttctgctcacattccctctcatccaggtcctttccttctcgtcttcctctctctcacctacttcctcctcctcctcctgttcctgccttctcttctatcctgcaatttctcccgaatcctgaggggatatccctatgtcccagcccctggtactcccccagccctcagttttcagtcaagttccgtctcctctccagccctatggaagtctcaaggtcacgggacccctaatcagagtggccaatccctgtgtgtcgttcccttgtgtctgttgcttattgggagtaggagttgctcctacccctgtcctggggctgggtgtgtttcaggacagctgcttctgtgcatttgtgtctgcctgcctcatgctctctatagaggaggatggtcatcgtgacagcagcagctcaagttagcatttcaagtgatttgggggtgcaatgataatgaagaatggccattttgtaccagggctctgtattctgcaacagcctgtttgggaggctggagtggaaacaaagggtgggcatcaaagatgagaagccaaagcccctacaactccagccacccagccaggaggggctgtccaatcacattcaggcatgcgaatgagctgggccctgggtgaggtgggggtctggcctagtggggaggggcctggcctgggtggggcagggcctggcctggtccaggcttgggctccattcccatcactgctgtccctcctgaggtctggattggggatggggacaaagaaatagcaagagatgagaaacaacagaaacttttttctctaaaggactggttaaatcaattctgatacagccttacaatacaatagtatgcagctaaaaaataattgtatgtctttatatactaatatgtaataatcttcaggtgaaaaaggcaagccacagaaatgtgtwtagcgcacttcccatttgtgtttcagaaaggagtagaatataaacacataattgcttatgtatgcctattcagaataaatgggtaacactgattacttttgggaggggaaccagtaggttgaggacaggagagggaagggtcttaacacttacacccttttgtacattttgaattttgaaccatgtgactgtattacctattcaaaataaacaataaatgggcccaaaaaaaaaaaaaaaaa

SEQ ID NO: 1149 - DNA, 2872 bp, Homo sapiens
  Genbank Accession No. U39840
tccaggaatcgatagtgcattcgtgcgcgcggccgcccgtcgcttcgcacagggctggatggttgtattgggcagggtggctccaggatgttaggaactgtgaagatggaagggcatgaaaccagcgactggaacagctactacgcagacacgcaggaggcctactcctcggtcccggtcagcaacatgaactcaggcctgggctccatgaactccatgaacacctacatgaccatgaacaccatgactacgagcggcaacatgaccccggcgtccttcaacatgtcctatgccaacccggccttaggggccggcctgagtcccggcgcagtagccggcatgccggggggctcggcgggcgccatgaacagcatgactgcggccggcgtgacggccatgggtacggcgctgagcccgagcggcatgggcgccatgggtgcgcagcaggcggcctccatgatgaatggcctgggcccctacgcggccgccatgaacccgtgcatgagccccatggcgtacgcgccgtccaacctgggccgcagccgcgcgggcggcggcggcgacgccaagacgttcaagcgcagttacccgcacgccaagccgccctactcgtacatctcgctcatcaccatggccatccagcgggcgcccagcaagatgctcacgctgagcgagatctaccagtggatcatggacctcttcccctattaccggcagaaccagcagcgctggcagaactccatccgccactcgctgtccttcaatgactgcttcgtcaaggtggcacgctccccggacaagccgggcaagggctcctactggacgctgcacccggactccggcaacatgttcgagaacggctgctacttgcgccgccagaagcgcttcaagtgcgagaagcagccgggggccggcggcgggggcgggagcggaagcgggggcagcggcgccaagggcggccctgagagccgcaaggacccctctggcgcctctaaccccagcgccgactcgcccctccatcggggtgtgcacgggaagaccggccagctagagggcgcgccggccccgggcccggccgccagcccccagactctggaccacagtggggcgacggcgacagggggcgcctcggagttgaagactccagcctcctcaactgcgccccccataagctccgggcccggggcgctggcctctgtgcccgcctctcacccggcacacggcttggcaccccacgagtcccagctgcacctgaaaggggacccccactactccttcaaccacccgttctccatcaacaacctcatgtcctcctcggagcagcagcataagctggacttcaaggcatacgaacaggcactgcaatactcgccttacggctctacgttgcccgccagcctgcctctaggcagcgcctcggtgaccaccaggagccccatcgagccctcagccctggagccggcgtactaccaaggtgtgtattccagacccgtcctaaacacttcctagctcccgggactggggggtttgtctggcatagccatgctggtagcaagagagaaaaaatcaacagcaaacaaaaccacacaaaccaaaccgtcaacagcataataaaatccaacaactatttttatttcatttttcatgcacaaccttgcccccagtgcaaaagactgttactttattattgtattcaaaattcattgtgtatattactacaaagacggccccaaaccaatttttttcctgcgaagtttaatgatccacaagtgtatatatgaaattctcctccttccttgcccccctctctttcttccctcttggccctccagacattctagtttgtggagggttatttaaaaaacaaaaaggaagatggtcaagtttgtaaaatatttgtttgtgcttttcccccctccttacctgaccccctacgagtttacaggcttgtggcaatactcttaaccataagaattgaaatggtgaagaaacaagtatacactagaggctcttaaaagtattgaaaagacaatactgctgttatatagcaagacataaacagattataaacatcagagccatttgcttctcagtttacatttctgatacatgcagatagcagatgtctttaaatgaaatacatgtatattgtgtatggacttaattatgcacatgctcagatgtgtagacatcctccgtatatttacataacatatagaggtaatagataggtgatatacgtgatacgttctcaagagttgcttgaccgaaagttacaaggaccccaacccctttgctctctacccacagatggccctgggaacaatcctcaggaattgccctcaagaactcgcttctttgctttgagagtgccatggtcatgtcattctgaggtacataacacataaattagtttctatgagtgtataccatttaaagattttttcagtaaagggaatattacatgttgggaggaggagataagttatagggagctggatttcaaacggtggtccaagattcaaaaatcctattgatagtggccattttaatcattgccatcgtgtgcttgtttcatccagtgttatgcactttccacagttggtgttagtatagccagagggtttcattattatttctctttgctttctcaatgttaatttattgcatggtttattctttttctttacagctgaaattgctttaaatgatggttaaaattacaaattaaattgggaatttttatcaatgtgattgtaattaaaaatattttgatttaaataacaaaaataataccagattttaagccgcggaaaatgttcttgatcatttgcagttaaggactttaaataaatcaaatgttaacaaaaaa

SEQ ID NO: 1150 - DNA, 2344 bp, Homo sapiens
  Genbank Accession No. U41518
cctccctgactgggaactcgcttggccgcaatgacctggctgatggtgtgaactcgggccagggcctgggcatcgagatcatcgggaccctccagctggtgctatgcgtgctggctactaccgaccggaggcgccgtgaccttggtggctcagccccccttgccatcggcctctctgtagcccttggacacctcctggctattgactacactggctgtgggattaaccctgctcggtcctttggctccgcggtgatcacacacaacttcagcaaccactggattttctgggtggggccattcatcgggggagccctggctgtactcatctacgacttcatcctggccccacgcagcagtgacctcacagaccgcgtgaaggtgtggaccagcggccaggtggaggagtatgacctggatgccgacgacatcaactccagggtggagatgaagcccaaatagaaggggtctggcccgggcatccacgtagggggcaggggcaggggcgggcggagggaggggaggggtgaaatccatactgtagacactctgacaagctggccaaagtcacttccccaagatctgccagacctgcatggtcaagcctcttatgggggtgtttctatctctttctttctctttctgtttcctggcctcagagcttcctggggaccaagatttaccaattcacccactcccttgaagttgtggaggaggtgaaagaaagggacccacctgctagtcgcccctcagagcatgatgggaggtgtgccagaaagtcccccctcgccccaaagttgctcaccgactcacctgcgcaagtgcctgggattctaccgtaattgctttgtgcctttgggcaggccctccttcttttcctaacatgcaccttgctcccaatggtgcttggagggggaagagatcccaggaggtgcagtggagggggcaagctttgctccttcagttctgcttgctcccaagcccctgacccgctcggacttcctgcctgaccttggaatcgtccctatatcagggcctgagtgacctccttctgcaaagtggcagggaccggcagagctctacaggcctgcagcccctaagtgcaaacacagcatgggtccagaagacgtggtctagaccagggctgctctttccacttgccctgtgttctttccccaggggcatgactgtcgccacacgcctctgtgtacatgtgtgcagagcagacaggctacaaagcagagatcgacagacagccaggtagttggaactttctgttccctctggagaggcttccctacacagggcctgctattgcagaatgaagccatttagagggtgaaggagaaatacccatgttacttctctgacttttagttggtctttccatctatcactgcattatcttgctcattcttcagttctctactccctcttgtcagtgtagacacaggtcaccattatgctggtgtatgtttatcaaagagcacttgagctgtctgaagcccaaagcctgaggacagaaagaccctgatgcaggtcagcccatggaggcagatgcccttcctgggcctgggggttttccaagccctcagctggtcctgaccaggatggagcaagctcttcccttgctcatgagctcctgatcagaggcatttgagcagctgataacctgcacaggcttgctgtatgacccctggccacagccttccctctgcattgacctggaggggagaggtcagccttgacctaatgaggtagctatagttgcagcccaaggacagttcagagatcaggatcagctttgaaggctggattctatctacataagtcctttcaattccaccagggccagagcagctccaccactgtgcacttagccatgatggcaacagaaaccaagagacacaattacgcaggtatttagaaggagagggcaaccagaaggcccttaactatcaccagtgcatcacatctgcagcactctcttctctattccctagcaggaacttctagctcatttaacagataaagaaactgaggcccacggtttcagctagacaatgatttgccaggcctagtaaccaaggccctgtctctggctactccctggaccacgaggctgattcctctcatttccagcttctcagtttctgcctgggcaatgccaggggccaggagtggggagagttgtgatggaggggagaggggtcacacccaccccctgcctggttctaggctgctgcacaccaaggccctgcatctgtctgctctgcatatatgtctctttggagttggaatttcattatatgttaagaaaataaaggaaaatgacttgtaaggtc

SEQ ID NO: 1151 - DNA, 5926 bp, Homo sapiens
  Genbank Accession No. U48959
ccggctgcctctgctgcagttcagagcaacttcaggagcttcccagccgagagcttcaggacgcctttcctgtcccactggcccagttgccacaacaaacaacagagaagacggtgaccatgggggatgtgaagctggttgcctcgtcacacatttccaaaacctccctcagtgtggatccctcaagagttgactccatgcccctgacagaggcccctgctttcattttgccccctcggaacctctgcatcaaagaaggagccaccgccaagttcgaagggcgggtccggggttacccagagccccaggtgacatggcacagaaacgggcaacccatcaccagcgggggccgcttcctgctggattgcggcatccgggggactttcagccttgtgattcatgctgtccatgaggaggacaggggaaagtatacctgtgaagccaccaatggcagtggtgctcgccaggtgacagtggagttgacagtagaaggaagttttgcgaagcagcttggtcagcctgttgtttccaaaaccttaggggatagattttcagcttcagcagtggagacccgtcctagcatctggggggagtgcccaccaaagtttgctaccaagctgggccgagttgtggtcaaagaaggacagatgggacgattctcctgcaagatcactggccggccccaaccgcaggtcacctggctcaagggaaatgttccactgcagccgagtgcccgtgtgtctgtgtctgagaagaacggcatgcaggttctggaaatccatggagtcaaccaagatgacgtgggagtgtacacgtgcctggtggtgaacgggtcggggaaggcctcgatgtcagctgaactttccatccaaggtttggacagtgccaataggtcatttgtgagagaaacaaaagccaccaattcagatgtcaggaaagaggtgaccaatgtaatctcaaaggagtcgaagctggacagtctggaggctgcagccaaaagcaagaactgctccagcccccagagaggtggctccccaccctgggctgcaaacagccagcctcagcccccaagggagtccaagctggagtcatgcaaggactcgcccagaacggccccgcagaccccggtccttcagaagacttccagctccatcaccctgcaggccgcaagagttcagccggaaccaagagcaccaggcctgggggtcctatcaccttctggagaagagaggaagaggccagctcctccccgtccagccaccttccccaccaggcagcctggcctggggagccaagatgttgtgagcaaggctgctaacaggagaatccccatggagggccagagggattcagcattccccaaatttgagagcaagccccaaagccaggaggtcaaggaaaatcaaactgtcaagttcagatgtgaagtttccgggattccaaagcctgaagtggcctggttcctggaaggcacccccgtgaggagacaggaaggcagcattgaggtttatgaagatgctggctcccattacctctgcctgctgaaagcccggaccagggacagtgggacatacagctgcactgcttccaacgcccaaggccaggtgtcctgtagctggaccctccaagtggaaaggcttgccgtgatggaggtggccccctccttctccagtgtcctgaaggactgcgctgttattgagggccaggattttgtgctgcagtgctccgtacgggggaccccagtgccccggatcacttggctgctgaatgggcagcccatccagtacgctcgctccacctgcgaggccggcgtggctgagctccacatccaggatgccctgccggaggaccatggcacctacacctgcctagctgagaatgccttggggcaggtgtcctgcagcgcctgggtcaccgtccatgaaaagaagagtagcaggaagagtgagtaccttctgcctgtggctcccagcaagcccactgcacccatcttcctgcagggcctctctgatctcaaagtcatggatggaagccaggtcactatgactgtccaagtgtcagggaatccaccccctgaagtcatctggctgcacaatgggaatgagatccaagagtcagaggacttccactttgaacagagaggaactcagcacagcctttggatccaggaagtgttcccggaggacacgggcacgtacacctgcgaggcctggaacagcgctggagaggtccgcacccaggccgtgctcacggtacaagagcctcacgatggcacccagccctggttcatcagtaagcctcgctcagtgacagcctccctgggccagagtgtcctcatctcctgcgccatagctggtgacccctttcctaccgtgcactggctcagagatggcaaagccctctgcaaagacactggccacttcgaggtgcttcagaatgaggacgtgttcaccctggttctaaagaaggtgcagccctggcatgccggccagtatgagatcctgctcaagaaccgggttggcgaatgcagttgccaggtgtcactgatgctacagaacagctctgccagagcccttccacgggggagggagcctgccagctgcgaggacctctgtggtggaggagttggtgctgatggtggtggtagtgaccgctatgggtccctgaggcctggctggccagcaagagggcagggttggctagaggaggaagacggcgaggacgtgcgaggggtgctgaagaggcgcgtggagacgaggcagcacactgaggaggcgatccgccagcaggaggtggagcagctggacttccgagacctcctggggaagaaggtgagtacaaagaccctatcggaagacgacctgaaggagatcccggccgagcagatggatttccgtgccaacctgcagcggcaagtgaagccaaagactgtgtctgaggaagagaggaaggtgcacagcccccagcaggtcgattttcgctctgtcctggccaagaaggggacttccaagacccccgtgcctgagaaggtgccaccgccaaaacctgccaccccggattttcgctcagtgctgggtggcaagaagaaattaccagcagagaatggcagcagcagtgccgagaccctgaatgccaaggcagtggagagttccaagcccctgagcaatgcacagccttcagggcccttgaaacccgtgggcaacgccaagcctgctgagaccctgaagccaatgggcaacgccaagcctgccgagaccctgaagcccatgggcaatgccaagcctgatgagaacctgaaatccgctagcaaagaagaactcaagaaagacgttaagaatgatgtgaactgcaagagaggccatgcagggaccacagataatgaaaagagatcagagagccaggggacagccccagccttcaagcagaagctgcaagatgttcatgtggcagagggcaagaagctgctgctccagtgccaggtgtcttctgaccccccagccaccatcatctggacgctgaatggaaagaccctcaagaccaccaagttcatcatcctctcccaggaaggctcactctgctccgtctccatcgagaaggcactgcctgaggacagaggcttatacaagtgtgtagccaagaatgacgctggccaggcggagtgctcctgccaagtcaccgtggatgatgctccagccagtgagaacaccaaggccccagagatgaaatcccggaggcccaagagctctcttcctcccgtgctaggaactgagagtgatgcgactgtgaaaaagaaacctgcccccaagacacctccgaaggcagcaatgccccctcagatcatccagttccctgaggaccagaaggtacgcgcaggagagtcagtggagctgtttggcaaagtgacaggcactcagcccatcacctgtacctggatgaagttccgaaagcagatccaggaaagcgagcacatgaaggtggagaacagcgagaatggcagcaagctcaccatcctggccgcgcgccaggagcactgcggctgctacacactgctggtggagaacaagctgggcagcaggcaggcccaggtcaacctcactgtcgtggataagccagaccccccagctggcacaccttgtgcctctgacattcggagctcctcactgaccctgtcctggtatggctcctcatatgatgggggcagtgctgtacagtcctacagcatcgagatctgggactcagccaacaagacgtggaaggaactagccacatgccgcagcacctctttcaacgtccaggacctgctgcctgaccacgaatataagttccgtgtacgtgcaatcaacgtgtatggaaccagtgagccaagccaggagtctgaactcacaacggtaggagagaaacctgaagagccgaaggatgaagtggaggtgtcagatgatgatgagaaggagcccgaggttgattaccggacagtgacaatcaatactgaacaaaaagtatctgacttctacgacattgaggagagattaggatctgggaaatttggacaggtctttcgacttgtagaaaagaaaactcgaaaagtctgggcagggaagttcttcaaggcatattcagcaaaagagaaagagaatatccggcaggagattagcatcatgaactgcctccaccaccctaagctggtccagtgtgtggatgcctttgaagaaaaggccaacatcgtcatggtcctggagatcgtgtcaggaggggagctgtttgagcgcatcattgacgaggactttgagctgacggagcgtgagtgcatcaagtacatgcggcagatctcggagggagtggagtacatccacaagcagggcatcgtgcacctggacctcaagccggagaacatcatgtgtgtcaacaagacgggcaccaggatcaagctcatcgactttggtctggccaggaggctggagaatgcggggtctctgaaggtcctctttggcaccccagaatttgtggctcctgaagtgatcaactatgagcccatcggctacgccacagacatgtggagcatcggggtcatctgctacatcctagtcagtggcctttcccccttcatgggagacaacgataacgaaaccttggccaacgttacctcagccacctgggacttcgacgacgaggcattcgatgagatctccgacgatgccaaggatttcatcagcaatctgctgaagaaagatatgaaaaaccgcctggactgcacgcagtgccttcagcatccatggctaatgaaagataccaagaacatggaggccaagaaactctccaaggaccggatgaagaagtacatggcaagaaggaaatggcagaaaacgggcaatgctgtgagagccattggaagactgtcctctatggcaatgatctcagggctcagtggcaggaaatcctcaacagggtcaccaaccagcccgctcaatgcagaaaaactagaatctgaagaagatgtgtcccaagctttccttgaggctgttgctgaggaaaagcctcatgtaaaaccctatttctctaagaccattcgcgatttagaagttgtggagggaagtgctgctagatttgactgcaagattgaaggatacccagaccccgaggttgtctggttcaaagatgaccagtcaatcagggagtcccgccacttccagatagactacgatgaggacgggaactgctctttaattattagtgatgtttgcggggatgacgatgccaagtacacctgcaaggctgtcaacagtcttggagaagccacctgcacagcagagctcattgtggaaacgatggaggaaggtgaaggggaaggggaagaggaagaagagtgaaacaaagccagagaaaagcagtttctaagtcatattaaaaggactatttctctcaaaatcca

SEQ ID NO: 1152 - DNA, 2269 bp, Homo sapiens
  Genbank Accession No. U50410
aggtagctgcgaggaaacttttgcagcggctgggtagcagcacgtctcttgctcctcagggccactgccaggcttgccgagtcctgggactgctctcgctccggctgccactctcccgcgctctcctagctccctgcgaacgagatggccgggaccgtgcgcaccgcgtgcttggtggtggcgatgctgctcagcttggacttcccgggacaggcgcagcccccgccgccgccgccggacgccacctgtcaccaagtccgctccttcttccagagactgcagcccggactcaagtgggtgccagaaactcccgtgccaggatcagatttgcaagtatgtctccctaagggcccaacatgctgctcaagaaagatggaagaaaaataccaactaacagctcgattgaacatggaacagctgcttcagtctgcaagtatggagctcaagttcttaattattcagaatgctgcggttttccaagaggcctttgaaattgttgttcgccatgccaagaactacaccaatgccatgttcaagaacaactacccaagcctgactccacaagcttttgagtttgtgggtgaatttttcacagatgtgtctctctacatcttgggttctgacatcaatgtagatgacatggtcaatgaattgtttgacagcctgtttccagtcatctatacccagctaatgaacccaggcctgcctgattcagccttggacatcaatgagtgcctccgaggagcaagacgtgacctgaaagtatttgggaatttccccaagcttattatgacccaggtttccaagtcactgcaagtcactaggatcttccttcaggctctgaatcttggaattgaagtgatcaacacaactgatcacctgaagttcagtaaggactgtggccgaatgctcaccagaatgtggtactgctcttactgccagggactgatgatggttaaaccctgtggcggttactgcaatgtggtcatgcaaggctgtatggcaggtgtggtggagattgacaagtactggagagaatacattctgtcccttgaagaacttgtgaatggcatgtacagaatctatgacatggagaacgtactgcttggtctcttttcaacaatccatgattctatccagtatgtccagaagaatgcaggaaagctgaccaccactattggcaagttatgtgcccattctcaacaacgccaatatagatctgcttattatcctgaagatctctttattgacaagaaagtattaaaagttgctcatgtagaacatgaagaaaccttatccagccgaagaagggaactaattcagaagttgaagtctttcatcagcttctatagtgctttgcctggctacatctgcagccatagccctgtggcggaaaacgacaccctttgctggaatggacaagaactcgtggagagatacagccaaaaggcagcaaggaatggaatgaaaaaccagttcaatctccatgagctgaaaatgaagggccctgagccagtggtcagtcaaattattgacaaactgaagcacattaaccagctcctgagaaccatgtctatgcccaaaggtagagttctggataaaaacctggatgaggaagggtttgaaagtggagactgcggtgatgatgaagatgagtgcattggagggtctggtgatggaatgataaaagtgaagaatcagctccgcttccttgcagaactggcctatgatctggatgtggatgatgcgcctggaaacagtcagcaggcaactccgaaggacaacgagataagcacctttcacaacctcgggaacgttcattccccgctgaagcttctcaccagcatggccatctcggtggtgtgcttcttcttcctggtgcactgactgcctggtgcccagcacatgtgctgccctacagcaccctgtggtcttcctcgataaagggaaccactttcttatttttttctatttttttttttttgttatacctggtatacctcctccagccatgaagtagaggactaaccatgtgttatgttttcgaaaatcaaatggtatcttttggaggaagatacattttagtggtagcatatagattgtccttttgcaaagaaagaaaaaaaaccatcaagttgtgccaaattattctcctatgtttggctgctagaacatggttaccatgtctttctctctcactccctccctttctatcgttctctctttgcatggatttctttaaaaaaaataaattgctcaaataaaaaca

SEQ ID NO: 1153 - DNA, 2056 bp, Homo sapiens
  Genbank Accession No. U50527
cgtgacttcagtaawgggaacccggggctctcgcagccagccctcctgcccatggaggacagtttccttcaatcttttgggaggctgagcccagccccagcagcagcagcagcgkcagsgccgccccggcgcccccgcgggggacacctcctcgccgccacagctttaggaaacacctctacctcctgcgaggcctyccgggctccgggaaaactacactggccagacaattgcagcatgactttcccagggccctgattttcagcacggatgattttttcttcagggaagatggtgcctatgagttcaatcctgacttcctggaggaagctcatgaatggaaccaaaaaagagcaagaaaagcaatgaggaatggyatatcccccattattattgataataccaacctccacgcctgggaaatgaagccctatgcagtcatggtatttcagaccgaacaaaagaatcttttcaggctggaaatggacatggtagttttcaggccagaaatgaagaaacattcatggtgtctcaagagaaaaaatccaccgaatgaaagaacggtatgaacacgatgttacttttcacagtgtgcttcatgcagaaaagcggagcagaatgaacagaaaccaggacaggaataatgcattgccttccaacaatgccagatactggaattcctacacagagcttccaaaccgtaggcccacggtggatttacaaatgagagctcctatcacagaaggggcggttgtcaccatggatattagaggcctatcttacagccaggcagaattttcctaagtcagtttctacttcagtttttgttattttgttgcattttagtcagagctccaattccagtgtaaatagctgaactcaaaagtttctgagcaaagtcattatattcactttcttcaccaaaatttgttaaagtgcttctatatgcatggtctgatgctgggaattctgcagatttgagtaaacagtctctttctctagggtaagaatttgaaaccaaaacttgagaacacacccaagaatatatttacataggttcatagatgaaataaagtgtttatattatatataagcttcagtaccatttagctctgaagtgatctatttattttttcaggaaattcatctccatcggtaaagttgggaaggtggagagaagtggtgggggggcattgctacttatcaaagtgccattgctactttgataatctatgtatctaaaaatgtgwgatgtgcgactcttatgatactgattttcctttaatgttaatatgccagaaagcatacatctaagggaacattgtccttcaaagtagacactttgggaagttatttctttattttaatgatgtatcattgttaaaaatgctgtcaaatccttaatagctacaggagctactgagggaaatcagtgtcattatttaaagtcacgccttgtgtttttactactttattcagcaggattaaacctgaataacttttggctgttgtgctaatagtgtaaataaaataagcctgccttcataaaacactaacttttaaaaggaataaacgacttctaaaattatgcctattaacatgtgtaattagtcggcagctcaaatgtttgggagtgcaagaaattcggcaccccaggatataggtcatacagggatatataaaagccatgctcattacaaaatgagcagttgatgttttatgtggcattaagacaatcaagtcctcacaactctggaatgtcttcttatactgatgctgaatttatgaatccaaattaatttccaacaggttggaatcagatttaatgtgagatcatgatagacaagaccacagaggacgtatgctctatttcttgttggccaacagcttctttctaatgttctgtgaaaaattattttaagtgtcttatataatggtgscttttatgttattaaaaattgtaaatggtatcacatttatatggatttgtcattggatctttttttggttcaacaataaaaaaatttaattaccaaaaaaaaaaaaaaaaaaaaaa

SEQ ID NO: 1154 - DNA, 1934 bp, Homo sapiens
  Genbank Accession No. U58516
agaaccccgcggggtctgagcagcccagcgtgcccattccagcgcccgcgtccccgcagcatgccgcgcccccgcctgctggccgcgctgtgcggcgcgctgctctgcgcccccagcctcctcgtcgccctggatatctgttccaaaaacccctgccacaacggtggtttatgcgaggagatttcccaagaagtgcgaggagatgtcttcccctcgtacacctgcacgtgccttaagggctacgcgggcaaccactgtgagacgaaatgtgtcgagccactgggcatggagaatgggaacattgccaactcacagatcgccgcctcatctgtgcgtgtgaccttcttgggtttgcagcattgggtcccggagctggcccgcctgaaccgcgcaggcatggtcaatgcctggacacccagcagcaatgacgataacccctggatccaggtgaacctgctgcggaggatgtgggtaacaggtgtggtgacgcagggtgccagccgcttggccagtcatgagtacctgaaggccttcaaggtggcctacagccttaatggacacgaattcgatttcatccatgatgttaataaaaaacacaaggagtttgtgggtaactggaacaaaaacgcggtgcatgtcaacctgtttgagacccctgtggaggctcagtacgtgagattgtaccccacgagctgccacacggcctgcactctgcgctttgagctactgggctgtgagctgaacggatgcgccaatcccctgggcctgaagaataacagcatccctgacaagcagatcacggcctccagcagctacaagacctggggcttgcatctcttcagctggaacccctcctatgcacggctggacaagcagggcaacttcaacgcctgggttgcggggagctacggtaacgatcagtggctgcaggtggacctgggctcctcgaaggaggtgacaggcatcatcacccagggggcccgtaactttggctctgtccagtttgtggcatcctacaaggttgcctacagtaatgacagtgcgaactggactgagtaccaggaccccaggactggcagcagtaagatcttccctggcaactgggacaaccactcccacaagaagaacttgtttgagacgcccatcctggctcgctatgtgcgcatcctgcctgtagcctggcacaaccgcatcgccctgcgcctggagctgctgggctgttagtggccacctgccacccccaggtcttcctgctttccatgggcccgctgcctcttggcttctcagcccctttaaatcaccatagggctggggactggggaaggggagggtgttcagaggcagcaccaccacacagtcacccctccctccctctttcccaccctccacctctcacgggccctgccccagcccctaagccccgtcccctaacccccagtcctcactgtcctgttttcttaggcactgagggatctgagtaggtctgggatggacaggaaagggcaaagtagggcgtgtggtttccctgcccctgtccggaccgccgatcccaggtgcgtgtgtctctgtctctcctagcccctctctcacacatcacattcccatggtggcctcaagaaaggcccggaagccccaggctggagataacagcctcttgcccgtcggccctgcgtcggccctggggtaccatgtgccacaactgctgtggccccctgtccccaagacacttccccttgtctccctggttgcctctcttgccccttgtcctgaagcccagcgacacagaagggggtggggcgggtctatggggagaaagggagcgaggtcagaggagccggcatgggttggcagggtgggcgtttggggccctcatgctggcttttcaccccagaggacacaggcagcttccaaaatatatttatcttcttcacggg

SEQ ID NO: 1155 - DNA, 921 bp, Homo sapiens
  Genbank Accession No. U59877
ccctcggacggccccggaggatgctgctgagccccggcactgcctggctgcgagcacatgatggcgatacgggagctcaaagtgtgccttctcggggacactggggttgggaaatcaagcatcgtgtgtcgatttgtccaggatcactttgaccacaacatcagccctactattggggcatcttttatgaccaaaactgtgccttgtggaaatgaacttcacaagttcctcatctgggacactgctggtcaggaacggtttcattcattggctcccatgtactatcgaggctcagctgcagctgttatcgtgtatgatattaccaagcaggattcattttataccttgaagaaatgggtcaaggagctgaaagaacatggtccagaaaacattgtaatggccatcgctggaaacaagtgcgacctctcagatattagggaggttcccctgaaggatgctaaggaatacgctgaatccataggtgccatcgtggttgagacaagtgcaaaaaatgctattaatatcgaagagctctttcaaggaatcagccgccagatcccacccttggacccccatgaaaatggaaacaatggaacaatcaaagttgagaagccaaccatgcaagccagccgccggtgctgttgacccaagggcgtggtccacggtacttgaagaagccagagcccacatcctgtgcactgctgaaggaccctacgctcggtggcctggcacctcactttgagaagagtgagcacactggctttgcatcctggaaggcctgcagggggcggggcaggaaatgtacctgaaaaggattttagaaaaccctgggaaacccaccacaccaccacaaaatggcctttagtgtatgaaatgcacatggaggggatgtagttgcatttttgctaaaaaaaaaaaaaa

SEQ ID NO: 1156 - DNA, 1800 bp, Homo sapiens
  Genbank Accession No. U61374
ggaaggcgcgcctgccgaggcgagctaagcgcccgctcgccatggggagccccgcacatcggcccgcgctgctgctgctgctgccgcctctgctgctgctgctgctgcgcgtcccgcccagccgcagcttcccaggatcgggagactcaccactagaagacgatgaagtcgggtattcacaccctagatataaagataccccgtggtgctcccccatcaaggtgaagtatggggatgtgtactgcagggcccctcaaggaggatactacaaaacagccctgggaaccaggtgcgacattcgctgccagaagggctacgagctgcatggctcttccctactgatctgccagtcaaacaaacgatggtctgacaaggtcatctgcaaacaaaagcgatgtcctacccttgccatgccagcaaatggagggtttaagtgtgtagatggtgcctactttaactcccggtgtgagtattattgttcaccaggatacacgttgaaaggggagcggaccgtcacatgtatggacaacaaggcctggagcggcgccagcctcctgtgtggatatggacctcctagaatcaagtgcccaagtgtgaaggaacgcattgcagaacccaacaaactgacagtccgtgtctgggagacacccgaaggaagagacacagcagatggaattcttactgatgtcattctaaaaggcctccccccaggctccaactttccagaaggagaccacaagatccagtacacagtctatgacagagctgagaataagggcacttgcaaatttcgagttaaagtaagagtcaaacgctgtggcaaactcaatgccccagagaatggttacatgaagtgctccagcgacggtgataattatggagccacctgtgagttctcctgcatcggcggctatgagctccagggtagccctgcccgagtatgtcaatccaacctggcttggtctggcacggagcccacctgtgcagccatgaacgtcaatgtgggtgtcagaacggcagctgcacttctggatcagttttatgagaaaaggagactcctcattgtgtccacacccacagcccgaaacctcctttaccggctccagctaggaatgctgcagcaagcacagtgtggccttgatcttcgacacatcaccgtggtggagctggtgggtgtgttcccgactctcattggcaggataggagcaaagattatgcctccagccctagcgctgcagctcaggctgttgctgcgaatcccactctactccttcagtatggtgctagtggataagcatggcatggacaaagagcgctatgtctccctggtgatgcctgtggccctgttcaacctgattgacacttttcccttgagaaaagaagagatggtcctacaagccgaaatgagccagacctgtaacacctgacatgatggttcctctcttggcaattcctcttcattgtctacatagtgacatgcacacgggaaagccttaaaaatatccttgatgtacagattttatttgtaatttaaaagtctattttattatgagctttcttgcacttaaaaattagcatgctgctttttgtacttggaagtgtttcaaaaaattatatgaccatatttactctttctaactttctttactccatcatggctggttgattttgtagagaaattagaacccataaccatacacaggctatcaacatgttattcaatgtgacacctaactcttttctattttgttttttaagtaagacttttattaataaaacaaaatgttttggaaaaaaaaa

SEQ ID NO: 1157 - DNA, 3496 bp, Homo sapiens
  Genbank Accession No. U69263
cgaactctgaaaaggcggggcagcgggcctgcagctcctggagttcagggagacccggaaatctcaccctgccctcttcttgtgttgtgtttgtcacagccttgcccctcttgctcgccttgaaaatggaaaagatgctcgcaggctgctttctgctgatcctcggacagatcgtcctcctccctgccgaggccagggagcggtcacgtgggaggtccatctctaggggcagacacgctcggacccacccgcagacggcccttctggagagttcctgtgagaacaagcgggcagacctggttttcatcattgacagctctcgcagtgtcaacacccatgactatgcaaaggtcaaggagttcatcgtggacatcttgcaattcttggacattggtcctgatgtcacccgagtgggcctgctccaatatggcagcactgtcaagaatgagttctccctcaagaccttcaagaggaagtccgaggtggagcgtgctgtcaagaggatgcggcatctgtccacgggcaccatgaccgggctggccatccagtatgccctgaacatcgcattctcagaagcagagggggcccggcccctgagggagaatgtgccacgggtcataatgatcgtgacggatgggagacctcaggactccgtggccgaggtggctgctaaggcacgggacacgggcatcctaatctttgccattggtgtgggccaggtagacttcaacaccttgaagtccattgggagtgagccccatgaggaccatgtcttccttgtggccaatttcagccagattgagacgctgacctccgtgttccagaagaagttgtgcacggcccacatgtgcagcaccctggagcataactgtgcccacttctgcatcaacatccctggctcatacgtctgcaggtgcaaacaaggctacattctcaactcggatcagacgacttgcagaatccaggatctgtgtgccatggaggaccacaactgtgagcagctctgtgtgaatgtgccgggctccttcgtctgccagtgctacagtggctacgccctggctgaggatgggaagaggtgtgtggctgtggactactgtgcctcagaaaaccacggatgtgaacatgagtgtgtaaatgctgatggctcctacctttgccagtgccatgaaggatttgctcttaacccagataaaaaaacgtgcacaaagatagactactgtgcctcatctaatcacggatgtcagcacgagtgtgttaacacagatgattcctattcctgccactgcctgaaaggctttaccctgaatccagataagaaaacctgcagaaggatcaactactgtgcactgaacaaaccgggctgtgagcatgagtgcgtcaacatggaggagagctactactgccgctgccaccgtggctacactctggaccccaatggcaaaacctgcagccgagtggaccactgtgcacagcaggaccatggctgtgagcagctgtgtctgaacacggaggattccttcgtctgccagtgctcagaaggcttcctcatcaacgaggacctcaagacctgctcccgggtggattactgcctgctgagtgaccatggttgtgaatactcctgtgtcaacatggacagatcctttgcctgtcagtgtcctgagggacacgtgctccgcagcgatgggaagacgtgtgcaaaattggactcttgtgctctgggggaccacggttgtgaacattcgtgtgtaagcagtgaagattcgtttgtgtgccagtgctttgaaggttatatactccgtgaagatggaaaaacctgcagaaggaaagatgtctgccaagctatagaccatggctgtgaacacatttgtgtgaacagtgatgactcatacacgtgcgagtgcttggtgggattccggctcgctgaggatgggaaacgctgccgaaggaaggatgtctgcaaatcaacccaccatggctgcgaacacatttgtgttaataatgggaattcctacatctgcaaatgctcagagggatttgttctagctgaggacggaagacggtgcaagaaatgcactgaaggcccaattgacctggtctttgtgatcgatggatccaagagtcttggagaagagaattttgaggtcgtgaagcagtttgtcactggaattatagattccttgacaatttcccccaaagccgctcgagtggggctgctccagtattccacacaggtccacacagagttcactctgagaaacttcaactcagccaaagacatgaaaaaagccgtggcccacatgaaatacatgggaaagggctctatgactgggctggccctgaaacacatgtttgagagaagttttacccaaggagaaggggccaggcctttttccacaagggtgcccagagcagccattgtgttcaccgacggacgggctcaggatgacgtctccgagtgggccagtaaagccaaggccaatggtatcactatgtatgctgttggggtaggaaaagccattgaggaggaactacaagagattgcctctgagcccacaaacaagcatctcttctatgccgaagacttcagcacaatggatgagataagtgaaaaactcaagaaaggcatctgtgaagctctagaagactccgatggaagacaggactctccagcaggggaactgccaaaaacggtccaacagccaacagaatctgagccagtcaccataaatatccaagacctactttcctgttctaattttgcagtgcaacacagatatctgtttgaagaagacaatcttttacggtctacacaaaagctttcccattcaacaaaaccttcaggaagccctttggaagaaaaacacgatcaatgcaaatgtgaaaaccttataatgttccagaaccttgcaaacgaagaagtaagaaaattaacacagcgcttagaagaaatgacacagagaatggaagccctggaaaatcgcctgagatacagatgaagattagaaatcgcgacacatttgtagtcattgtatcacggattacaatgaacgcagtgcagagccccaaagctcaggctattgttaaatcaataatgttgtgaagtaaaacaatcagtactgagaaacctggtttgccacagaacaaagacaagaagtatacactaacttgtataaatttatctaggaaaaaaatccttcagaattctaagatgaatttaccaggtgagaatgaataagctatgcaaggtattttgtaatatactgtggacacaacttgcttctgcctcatcctgccttagtgtgcaatctcatttgactatacgataaagtttgcacagtcttacttctgtagaacactggccataggaaatgctgtttttttgtattggactttaccttgatatatgtatatggatgtatgcataaaatcataggacatatgtacttgtggaacaagttggattttttatacaatattaaaattcaccacttcagag

SEQ ID NO: 1158 - DNA, 2066 bp, Homo sapiens
  Genbank Accession No. U70370
tcgcgctggagggcagccgcttagcgtgcgctcttgtccccgcaggtcgcagccaggcggcgggcgcgcccagccccggcccctggagcgcccgccgcggtccccacctccatggacgccttcaaggggggcatgagcctggagcggctgccggaggggttccggccgccgccgccgccaccccatgacatggggcccgccttccacctggcccggcccgccgacccccgcgagccgctcgagaactccgccagcgagtcgtctgacacggagctgccagagaaggagcgcggcggggaacccaaggggcccgaggacagtggtgcgggaggcacgggctgcggcggcgcagacgacccagccaagaagaagaagcagcggcggcaacgtacgcacttcacaagccagcagttgcaagagctagaggccacgttccagaggaaccgctaccccgacatgagcatgagggaggagatcgccgtgtggaccaacctcaccgagccgcgcgtgcgggtctggttcaagaacaggcgagccaagtggcgtaagcgcgagcgtaaccagcagctggacctgtgcaagggtggctacgtgccgcagttcagcggcctagtgcagccctacgaggacgtgtacgccgccggctactcctacaacaactgggccgccaagagcctggcgccagcgccgctctccaccaagagcttcaccttcttcaactccatgagcccgctgtcgtcgcagtccatgttctcagcacccagctccatctcctccatgaccatgccgtccagcatgggcccaggcgccgtgcctggcatgcccaactcgggcctcaacaacatcaacaacctcaccggctcctcgctcaactcggccatgtcgccgggcgcttgcccgtacggcactcccgcctcgccctacagcgtctaccgggacacgtgcaactcgagcctagccagcctgcggctcaagtccaaacagcactcgtcgtttggctacggcggcctgcagggcccggcctcgggcctcaacgcgtgccagtacaacagctgaccgccccgccgcaccacgcgggccggcggccggagcggggaagggcgcgggcgcggaggacgcacgcggggccccggctcgcaagccccagctcaccgcgccgcggacctcacacctgcgcagccccctcctcccacttcccactccgggttggttttgtgtttgcttttccggaccccactctgccctccaaaaagacaaaaaaaaaaaaaaaaaaaaaagcaaaaagacgtcggagaaaagtgccgcgaaaaaatggatgagttgcaatttctctcgggatggcgcgggtggtgtgtgtgtgttcccacgggccccggaggcccactccgcggagggcacgcggcgcggtaggcaagcgccgaggcccagcggccgggggaggacaacctcgtatcccgcgcccccgccgcgctggatccggactgagcggccgggcctgcggactggatgtgcggggcctggacttgcctaggatttcccgaccccgtacaaaccaagttgccctctccgagctaggcccggccgagagcgccttaactcgagtcggatccgtgttggggcgggcgttgggtttggggggacggtgcccccagcccaggatcgggcactcagtggagccgcacacggcccggcgcgcctggtagagcctcgctggccccgcgccccggagccctatattaaggccacggagcgacagcgggcagtgcgggcctggcgggaggtgggggaggtccatctcagaacaccccagccttgagcttagctgcaggcccaggccctctgctctgctcccgggctaggaggtggccctctgtctgggcgaacagccccctcctcaccgcccgccgtgcaagagtcgagccggcagagcaaggggcgcggccccagggccctgcgcccactttgcacacccgctctccggcccgcgcccctgtttacagcgtccctgtgtatgttggactgactgtaataaatctgtctatatcgactaaaaaaaaaaaaaaaaa

SEQ ID NO: 1159 - DNA, 783 bp, Homo sapiens
  Genbank Accession No. U73379
ggcacgagcgagttcctgtctctctgccaacgccgcccggatggcttcccaaaaccgcgacccagccgccactagcgtcgccgccgcccgtaaaggagctgagccgagcgggggcgccgcccggggtccggtgggcaaaaggctacagcaggagctgatgaccctcatgatgtctggcgataaagggatttctgccttccctgaatcagacaaccttttcaaatgggtagggaccatccatggagcagctggaacagtatatgaagacctgaggtataagctctcgctagagttccccagtggctacccttacaatgcgcccacagtgaagttcctcacgccctgctatcaccccaacgtggacacccagggtaacatatgcctggacatcctgaaggaaaagtggtctgccctgtatgatgtcaggaccattctgctctccatccagagccttctaggagaacccaacattgatagtcccttgaacacacatgctgccgagctctggaaaaaccccacagcttttaagaagtacctgcaagaaacctactcaaagcaggtcaccagccaggagccctgacccaggctgcccagcctgtccttgtgtcgtctttttaatttttccttagatggtctgtcctttttgtgatttctgtataggactctttatcttgagctgtggtatttttgttttgtttttgtcttttaaattaagcctcggttgagcccttgtatattaaataaatgcatttttgtccttttttaaaaaaaaaaaaaaaaaaa

SEQ ID NO: 1160 - DNA, 3492 bp, Homo sapiens
  Genbank Accession No. U74612
ggttggaggagcccggagcccgccttcggagctacggcctaacggcggcggcgactgcagtctggagggtccacacttgtgattctcaatggagagtgaaaacgcagattcataatgaaaactagcccccgtcggccactgattctcaaaagacggaggctgccccttcctgttcaaaatgccccaagtgaaacatcagaggaggaacctaagagatcccctgcccaacaggagtctaatcaagcagaggcctccaaggaagtggcagagtccaactcttgcaagtttccagctgggatcaagattattaaccaccccaccatgcccaacacgcaagtagtggccatccccaacaatgctaatattcacagcatcatcacagcactgactgccaagggaaaagagagtggcagtagtgggcccaacaaattcatcctcatcagctgtgggggagccccaactcagcctccaggactccggcctcaaacccaaaccagctatgatgccaaaaggacagaagtgaccctggagaccttgggaccaaaacctgcagctagggatgtgaatcttcctagaccacctggagccctttgcgagcagaaacgggagacctgtgcagatggtgaggcagcaggctgcactatcaacaatagcctatccaacatccagtggcttcgaaagatgagttctgatggactgggctcccgcagcatcaagcaagagatggaggaaaaggagaattgtcacctggagcagcgacaggttaaggttgaggagccttcgagaccatcagcgtcctggcagaactctgtgtctgagcggccaccctactcttacatggccatgatacaattcgccatcaacagcactgagaggaagcgcatgactttgaaagacatctatacgtggattgaggaccactttccctactttaagcacattgccaagccaggctggaagaactccatccgccacaacctttccctgcacgacatgtttgtccgggagacgtctgccaatggcaaggtctccttctggaccattcaccccagtgccaaccgctacttgacattggaccaggtgtttaagccactggacccagggtctccacaattgcccgagcacttggaatcacagcagaaacgaccgaatccagagctccgccggaacatgaccatcaaaaccgaactccccctgggcgcacggcggaagatgaagccactgctaccacgggtcagctcatacctggtacctatccagttcccggtgaaccagtcactggtgttgcagccctcggtgaaggtgccattgcccctggcggcttccctcatgagctcagagcttgcccgccatagcaagcgagtccgcattgcccccaaggtttttggggaacaggtggtgtttggttacatgagtaagttctttagtggcgatctgcgagattttggtacacccatcaccagcttgtttaattttatctttctttgtttatcagtgctgctagctgaggaggggatagctcctctttcttctgcaggaccagggaaagaggagaaactcctgtttggagaagggttttctcctttgcttccagttcagactatcaaggaggaagaaatccagcctggggaggaaatgccacacttagcgagacccatcaaagtggagagccctcccttggaagagtggccctccccggccccatctttcaaagaggaatcatctcactcctgggaggattcgtcccaatctcccaccccaagacccaagaagtcctacagtgggcttaggtccccaacccggtgtgtctcggaaatgcttgtgattcaacacagggagaggagggagaggagccggtctcggaggaaacagcatctactgcctccctgtgtggatgagccggagctgctcttctcagaggggcccagtacttcccgctgggccgcagagctcccgttcccagcagactcctctgaccctgcctcccagctcagctactcccaggaagtgggaggaccttttaagacacccattaaggaaacgctgcccatctcctccaccccgagcaaatctgtcctccccagaacccctgaatcctggaggctcacgcccccagccaaagtagggggactggatttcagcccagtacaaacctcccagggtgcctctgaccccttgcctgaccccctggggctgatggatctcagcaccactcccttgcaaagtgctcccccccttgaatcaccgcaaaggctcctcagttcagaacccttagacctcatctccgtcccctttggcaactcttctccctcagatatagacgtccccaagccaggctccccggagccacaggtttctggccttgcagccaatcgttctctgacagaaggcctggtcctggacacaatgaatgacagcctcagcaagatcctgctggacatcagctttcctggcctggacgaggacccactgggccctgacaacatcaactggtcccagtttattcctgagctacagtagagccctgcccttgcccctgtgctcaagctgtccaccatcccgggcactccaaggctcagtgcaccccaagcctctgagtgaggacagcaggcagggactgttctgctcctcatagctccctgctgcctgattatgcaaaagtagcagtcacaccctagccactgctgggaccttgtgttccccaagagtatctgattcctctgctgtccctgccaggagctgaagggtgggaacaacaaaggcaatggtgaaaagagattaggaaccccccagcctgtttccattctctgcccagcagtctcttaccttccctgatctttgcagggtggtccgtgtaaatagtataaattctccaaattatcctctaattataaatgtaagcttatttccttagatcattatccagagactgccagaaggtgggtaggatgacctggggtttcaattgacttctgttccttgcttttagttttgatagaagggaagacctgcagtgcacggtttcttccaggctgaggtacctggatcttgggttcttcactgcagggacccagacaagtggatctgcttgccagagtcctttttgcccctccctgccacctccccgtgtttccaagtcagctttcctgcaagaagaaatcctggttaaaaaagtcttttgtattgggtcaggagttgaatttggggtgggaggatggatgcaactgaagcagagtgtgggtgcccagatgtgcgctattagatgtttctctgataatgtccccaatcataccagggagactggcattgacgagaactcaggtggaggcttgagaaggccgaaagggcccctgacctgcctggcttccttagcttgcccctcagctttgcaaagagccaccctaggccccagctgaccgcatgggtgtgagccagcttgagaacactaactactcaataaaagcgaaggtggacaaaaaaaaaaaaaaaaaa

SEQ ID NO: 1161 - DNA, 1982 bp, Homo sapiens
  Genbank Accession No. U81800
ggcgagaggcgggctgaggcggcccagcggcggcaggtgaggcggaaccaaccctcctggccatgggaggggccgtggtggacgagggccccacaggcgtcaaggcccctgacggcggctggggctgggccgtgctcttcggctgtttcgtcatcactggcttctcctacgccttccccaaggccgtcagtgtcttcttcaaggagctcatacaggagtttgggatcggctacagcgacacagcctggatctcctccatcctgctggccatgctctacgggacaggtccgctctgcagtgtgtgcgtgaaccgctttggctgccggcccgtcatgcttgtggggggtctctttgcgtcgctgggcatggtggctgcgtccttttgccggagcatcatccaggtctacctcaccactggggtcatcacggggttgggtttggcactcaacttccagccctcgctcatcatgctgaaccgctacttcagcaagcggcgccccatggccaacgggctggcggcagcaggtagccctgtcttcctgtgtgccctgagcccgctggggcagctgctgcaggaccgctacggctggcggggcggcttcctcatcctgggcggcctgctgctcaactgctgcgtgtgtgccgcactcatgaggcccctggtggtcacggcccagccgggctcggggccgccgcgaccctcccggcgcctgctagacctgagcgtcttccgggaccgcggctttgtgctttacgccgtggccgcctcggtcatggtgctggggctcttcgtcccgcccgtgttcgtggtgagctacgccaaggacctgggcgtgcccgacaccaaggccgccttcctgctcaccatcctgggcttcattgacatcttcgcgcggccggccgcgggcttcgtggcggggcttgggaaggtgcggccctactccgtctacctcttcagcttctccatgttcttcaacggcctcgcggacctggcgggctctacggcgggcgactacggcggcctcgtggtcttctgcatcttctttggcatctcctacggcatggtgggggccctgcagttcgaggtgctcatggccatcgtgggcacccacaagttctccagtgccattggcctggtgctgctgatggaggcggtggccgtgctcgtcgggcccccttcgggaggcaaactcctggatgcgacccacgtctacatgtacgtgttcatcctggcgggggccgaggtgctcacctcctccctgattttgctgctgggcaacttcttctgcattaggaagaagcccaaagagccacagcctgaggtggcggccgcggaggaggagaagctccacaagcctcctgcagactcgggggtggacttgcgggaggtggagcatttcctgaaggctgagcctgagaaaaacggggaggtggttcacaccccggaaacaagtgtctgagtggctgggcggggccggcaggcacagggaggaggtacagaagccggcaacgcttgctatttattttacaaactggactggctcaggcagggccacggctgggctccagctgccggcccagcggatcgtcgcccgatcagtgttttgagggggaaggtggcggggtgggaaccgtgtcattccagagtggatctgcggtgaagccaagccgcaaggttacaaggcatcctcaccaggggccccgcctgctgctcccaggtggcctgcggccactgctatgctcaaggacctggaaacccatgcttcgagacaacgtgactttaatgggagggtgggtgggccgcagacaggctggcagggcaggtgctgcgtggggccctctccagcccgtcctaccctgggctcacatggggcctgtgcccacccctcttgagtgtcttggggacagctctttccacccctggaagatggaaataaacctgcgtgtgggtggagtgttctcgtgccgaattcaaaaagctt

SEQ ID NO: 1162 - DNA, 2561 bp, Homo sapiens
  Genbank Accession No. U81992
aggctcaagataaagaccttaaagataactttgtgtgtctctccctttctaggtatttgcataggaatcagaggagttaatcttgtctcttctcacaggtttgaatcttcagacaaacttctgggaggactcggtccctgcctcgcagcagatgttccctgtcactcagtaggcatatggctacccattctccccagaaatctcaccagtgtgctcactgtgagaagacgttcaaccggaaagaccacctgaaaaaccacctccagacccacgaccccaacaaaatggcctttgggtgtgaggagtgtgggaagaagtacaacaccatgctgggctataagaggcacctggccctccatgcggccagcagtggggacctcacctgtggggtctgtgccctggagctagggagcaccgaggtgctactggaccacctcaaagcccatgcggaagagaagccccctagcggaaccaaggaaaagaagcaccagtgcgaccactgtgaaagatgcttctacacccggaaggatgtgcgacgccacctggtggtccacacaggatgcaaggacttcctgtgccagttctgtgcccagagatttgggcgcaaggttcacctcacccggcataccaagaagacccactcacaggagctgatgaaagagagcttgcagaccggagaccttctgagcaccttccacaccatctcgccttcattccaactgaaggctgctgccttgcctcctttccctttaggagcttctgcccagaacgggcttgcaagtagcttgccagctgaggtccatagcctcaccctcagtcccccagaacaagccgcccagcctatgcagccgctgccagagtccctggcctccctccacccctcggtatcccctggctctcctccgccaccccttcccaatcacaagtacaacaccacttctacctcatactccccacttgcaagcctgcccctcaaagcagatactaaaggtttttgcaatatcagtttgtttgaggacttgcctctgcaagagcctcagtcacctcaaaagctcaacccaggttttgatctggctaagggaaatgctggtaaagtaaacctgcccaaggagctgcctgcagatgctgtgaacctaacaatacctgcctctctggacctgtcccccctgttgggcttctggcagctgccccctcctgctacccaaaatacctttgggaatagcactcttgccctggggcctggggaatctttgccccacaggttaagctgtctggggcagcagcagcaagaacccccacttgccatgggcactgtgagcctgggccagctccccctgccccccatccctcatgtgttctcagctggcactggctctgccatcctgcctcatttccatcatgcattcagataattgatttttaaagtgtatttttccgtattctggaagatgttttaagaagcattttaaatgtcagttacaatatgagaaagatttggaaaacgagactgggactatggcttattcagtgatgactggcttgagatgataagagaattctcgaactgcatgtattgtgccaatctgtcctgagtgttcatgctttgtaccaaatttaatgaacgcgtgttctgtaatccaaactgcaaatattgtcataaccaacatccaaaatgacggctgctatatataagtgtttgtccatatgggaatttaatccgtaagcccatggatccataatgttaaactaaataactttatggtggcactgcctagtaagggaactatggaaaggtttggatttctccaaatctgggagaattttcaaaataagaaaataacctttatatgatatactatgactaggctgtgtatttcttttcagggatttttctaccttcagggttggatgtagtttagttactattaccatagccaacctgtagttttacatatacattttcttgtggagcaatagagttctccattttacagaagcattttaaatgtagtttgaatattttccacaagatgctgcaatgtgagttatcacttcatttatcttaaagaaagactaaactggttgtcagttacatctgacagaaaaaaaaaaaaaatcactgtgtaaccaggttaagtggtaaaataatccagggcgtcagtcaaaggcattttgctgactttaatattgattatatttttaacagggaatttaaggaaaatattacctgggaattaaaaaatatatatatattaaaacaagaattttcctttgcctctgtctagcttaaacctactacctcaagctgcttaagttccttaagtattgtttgtaatcaccaataaataagtgcatttgtaattcatcagtcattattagcttttattaaaagaagattacgttttacaatgtaactataatctcttgaatttggtatcttattaatgagttttaaagatgtaaaacctaaccttttttaaagctccattgtcttatgtttttagaggcttttccgtaaacatatatcttacatataataaacttttcaaatcttgcaaatt

SEQ ID NO: 1163 - DNA, 1771 bp, Homo sapiens
  Genbank Accession No. U82984
agggtagccttctaaaagactttcttcgaaacctcaaagaacctcttctgacctttcgccttaacagagcctttatggaagcagcagaaatcacagatgaagacaacagcatagctgccatgtaccaagctgttggtgaactgccccaggccaacagggacacattagctttcctcatgattcacttgcagagagtggctcagagtccacatactaaaatggatgttgccaatctggctaaagtctttggccctacaatagtggcccatgctgtgcccaatccagacccagtgacaatgttacaggacatcaagcgtcaacccaaggtggttgagcgcctgctttccttgcctctggagtattggagtcagttcatgatggtggagcaagagaacattgaccccctacatgtcattgaaaactcaaatgccttttcaacaccacagacaccagatattaaagtgagtttactgggacctgtgaccactcctgaacatcagcttctcaagactccttcatctagttccctgtcacagagagtccgttccaccctcaccaagaacactcctagatttgggagcaaaagcaagtctgccactaacctaggacgacaaggcaacttttttgcttctccaatgctcaagtgaagtcacatctgcctgttacttcccagcattgactgactataagaaaggacacatctgtactctgctctgcagcctcctgtactcattactacttttagcattctccaggcttttactcaagtttaattgtgcatgagggttttattaaaactatatatatctccccttccttctcctcaagtcacataatatcagcactttgtgctggtcattgttgggagcttttagatgagacatctttccaggggtagaagggttagtatggaattggttgtgattctttttggggaagggggttattgttcctttggcttaaagccaaatgctgctcatagaatgatctttctctagtttcatttagaactgatttccgtgagacaatgacagaaaccctacctatctgataagattagcttgtctcagggtgggaagtgggagggcagggcaaagaaaggattagaccagaggatttaggatgcctccttctaagaaccagaagttctcattccccattatgaactgagctataatatggagctttcataaaaatgggatgcattgaggacagaactagtgatgggagtatgcgtagctttgatttggatgattaggtctttaatagtgttgagtggcacaaccttgtaaatgtgaaagtacaactcgtatttatctctgatgtgccgctggctgaactttgggttcatttggggtcaaagccagtttttcttttaaaattgaattcattctgatgcttggcccccatacccccaaccttgtccagtggagcccaacttctaaaggtcaatatatcatcctttggcatcccaactaacaataaagagtaggctataagggaagattgtcaatattttgtggtaagaaaagctacagtcattttttctttgcactttggatgctgaaatttttcccatggaacatagccacatctagatagatgtgagctttttcttctgttaaaattattcttaatgtctgtaaaaacgattttcttctgtagaatgtttgattcgtattgacccttatctgtaaaacacctatttgggataatatttggaaaaaaagtaaatagctttttcaaaatgaaaaaaaaaaaaaaaaaagat

SEQ ID NO: 1164 - DNA, 3310 bp, Homo sapiens
  Genbank Accession No. U84487
ggcacgagggcactgagctctgccgcctggctctagccgcctgcctggcccccgccgggactcttgcccaccctcagccatggctccgatatctctgtcgtggctgctccgcttggccaccttctgccatctgactgtcctgctggctggacagcaccacggtgtgacgaaatgcaacatcacgtgcagcaagatgacatcaaagatacctgtagctttgctcatccactatcaacagaaccaggcatcatgcggcaaacgcgcaatcatcttggagacgagacagcacaggctgttctgtgccgacccgaaggagcaatgggtcaaggacgcgatgcagcatctggaccgccaggctgctgccctaactcgaaatggcggcaccttcgagaagcagatcggcgaggtgaagcccaggaccacccctgccgccgggggaatggacgagtctgtggtcctggagcccgaagccacaggcgaaagcagtagcctggagccgactccttcttcccaggaagcacagagggccctggggacctccccagagctgccgacgggcgtgactggttcctcagggaccaggctccccccgacgccaaaggctcaggatggagggcctgtgggcacggagcttttccgagtgcctcccgtctccactgccgccacgtggcagagttctgctccccaccaacctgggcccagcctctgggctgaggcaaagacctctgaggccccgtccacccaggacccctccacccaggcctccactgcgtcctccccagccccagaggagaatgctccgtctgaaggccagcgtgtgtggggtcagggacagagccccaggccagagaactctctggagcgggaggagatgggtcccgtgccagcgcacacggatgccttccaggactgggggcctggcagcatggcccacgtctctgtggtccctgtctcctcagaagggacccccagcagggagccagtggcttcaggcagctggacccctaaggctgaggaacccatccatgccaccatggacccccagaggctgggcgtccttatcactcctgtccctgacgcccaggctgccacccggaggcaggcggtggggctgctggccttccttggcctcctcttctgcctgggggtggccatgttcacctaccagagcctccagggctgccctcgaaagatggcaggagagatggcggagggccttcgctacatcccccggagctgtggtagtaattcatatgtcctggtgcccgtgtgaactcctctggcctgtgtctagttgtttgattcagacagctgcctgggatccctcatcctcatacccacccccacccaagggcctggcctgagctgggatgattggaggggggaggtgggatcctccaggtgcacaagctccaagctcccaggcattccccaggaggccagccttgaccattctccaccttccagggacagagggggtggcctcccaactcaccccagccccaaaactctcctctgctgctggctggttagaggttccctttgacgccatcccagccccaatgaacaattatttattaaatgcccagccccttctgacccatgctgccctgtgagtactacagtcctcccatctcacacatgagcatcaggccaggccctctgcccactccctgcaacctgattgtgtctcttggtcctgctgcagttgccagtcaccccggccacctgcggtgctatctcccccagccccatcctctgtacagagcccacgcccccactggtgacatgtcttttcttgcatgaggctagtgtggtgtttcctgggcactgcttccagtgaggctctgcccttggttaggsattgtgggaaggggagataagggtatctggtgactttcctctttggtctacactgtgctgagtctgaaggctgggttctgatcctagttccaccatcaagccaccaacatactcccatctgtgaaaggaaagagggaggtaaggaatacctgtccccctgacaacactcattgacctgaggcccttctctccagcccctggatgcagcctcacagtccttaccagcagagcaccttagacagtccctgccaatggactaacttgtctttggaccctgaggcccagagggcctgcargggagtgagttgatagcacagaccctgccctgtgggcccccaaatggaaatgggcagagcagagaccatccctgaaggccccgcccaggcttagtcactgagacagcccgggctctgcttcccatcacccgctaagagggagggagggctccagacacatgtccaagaagcccaggaaaggctccaggagcagccacattcctgatgcttcttcagagactcctgcaggcagccaggccacaagacccttgtggtcccaccccacacacgccagattctttcctgaggctgggctcccttcccacctctctcactccttgaaaacactgttctctgccctccaagaccttctccttcacctttgtccccaccgcagacaggaccaggggatttccatgatgttttccatgagtcccctgtttgtttctgaaagggacgctacccgggaagggggctgggacatgggaaaggggaagttgtaggcataaagtcaggggttcccttttttggctgctgaaggctcgagcatgcctggatggggctgcaccggctggcctggcccctcagggtccctggtggcagctcacctctcccttggattgtccccgacccttgccgtctacctgaggggcctcttatgggctgggttctacccaggtgctaggaacactccttcacagatgggtgcttggaggaaggaaacccagctctggtccatagagagcaaaacgctgtgctgccctgcccaccctggcctctgcactcccctgctgggtgtggcgcagcatattcaggaagctcagggccctggctcaggtggggtcactctggcagctcagagagggtgggagtgggtccaatgcactttgttctggctcttccaggctgggagagcctttcaggggtgggacaccctgtgatggggccctgcctcctttgtgaggaagccgctggggccagttggtcccccttccatggactttgttagtttctccaagcaggacatggacaaggatgatctaggaagactttggaaagagtaggaagactttggaaagacttttccaaccctcatcaccaacgtctgtgccattttgtattttactaataaaatttaaaagtcttgtgaaaaaaaaaaaaaaaaaaaaaaa

SEQ ID NO: 1165 - DNA, 2346 bp, Homo sapiens
  Genbank Accession No. U85267
tttttttttccccagggagtgggggctggcccttactgctttataagcaccagctcaagaaggaacctacagcctcttggaaaggaatctcactaggggcttgactgcgtgggtctgtagcgctttcactgtaagaaagcaagatgcattttagaaactttaactacagttttagctccctgattgcctgtgtggcaaacagtgatatcttcagcgaaagtgaaaccagggccaaatttgagtccctctttaggacgtatgacaaggacatcacctttcagtattttaagagcttcaaacgagtcagaataaacttcagcaaccccttctccgcagcagatgccaggctccagctgcataagactgagtttctgggaaaggaaatgaagttatattttgctcagaccttacacataggaagctcacacctggctccgccaaatccagacaagcagtttctgatctcccctcccgcctctccgccagtgggatggaaacaagtggaagatgcgaccccagtcataaactatgatctcttatatgccatctccaagctggggccaggggaaaagtatgaattgcacgcagcgactgacaccactcccagcgtggtggtccatgtatgtgagagtgatcaagagaaggaggaagaagaggaaatggaaagaatgaggagacctaagccaaaaattatccagaccaggaggccggagtacacgccgatccacctcagctgaactggcacgcgacgaggacgcattccaaatcatactcacgggaggaatcttttactgtggaggtggctggtcacgacttcttcggaggtggcagccgagatcggggtggcagaaatcccagttcatgttgctcagaagagaatcaaggccgtgtccccttgttctaatgctgcacaccagttactgttcatggcacccgggaatgacttgggccaatcactgagtttgtggtgatcgcacaaggacatttgggactgtcttgagaaaacagataatgatagtgttttgtacttgttcttttctggtaggttctgtctgtgccaagggcaggttgatcagtgagctcaggagagagcttcctgtttctaagtggcctgcaggggccactctctactggtaggaagaggtaccacaggaagccgcctagtgcagagaggttgtgaaaacagcagcaatgcaatgtggaaattgtagcgtttcctttcttccctcatgttctcatgtttgtgcatgtatattactgatttacaagactaacctttgttcgtatataaagttacaccgttgttgttttacatcttttgggaagccaggaaagcgtttggaaaacgtatcacctttcccagattctcggattctcgactctttgcaacagcacttgcttgcggaactcttcctggaatgcattcactcagcatccccaaccgtgcaacgtgtaacttgtgcttttgcaaaagaagttgatctgaaattcctctgtagaatttagcttatacaattcagagaatagcagtttcactgccaacttttagtgggtgagaaattttagtttaggtgtttgggatcggacctcagtttctgttgtttcttttatgtggtggtttctatacatgaatcatagccaaaaacttttttggaaactgttggttgagatagttggttcttttaccccacgaagacatcaagatacacttgtaaataaagctgatagcatatattcatacctgttgtacacttgggtgaaaagtatggcagtgggagactaagatgtattaacctacctgtgaatcatatgttgtaggaaaagctgttcccatgtctaacaggacttgaattcaaagcatgtcaagtggatagtagatctgtggcgatatgagagggatgcagtgcctttccccattcattcctgatggaattgttatactaggttaacatttgtaatttttttctagttgtaatgtgtatgtctggtaaataggtattatattttggccttacaataccgtaacaatgtttgtcattttgaaatacttaatgccaagtaacaatgcatgctttggaaatttggaagatggttttattctttgagaagcaaatatgtttgcattaaatgctttgattgttcatatcaagaaattgattgaacgttctcaaaccctgtttacggtacttggtaagagggagccggtttgggagagaccattgcatcgctgtccaagtgtttcttgttaagtgcttttaaactggagaggctaacctcaaaatactttttttaactgcattctataataaatgggcacagtatgctccttacaaaaaaaaaaaaaaa

SEQ ID NO: 1166 - DNA, 100267 bp, Homo sapiens
  Genbank Accession No. U89337
gatatctgagacaagtcaaggtaacagaggcagctgtttgaatagattcactggacaatctaaggcagctctccgcaccaagctgtaaaggagataagatagaaataatcactctggtaccacagtaaacaggccttgaaggtactggggccctcacagcttaatcagacttagcaagaatttttttgcctctgaccctctagttgaaacaaaattagttactgatagactttggtgaatgccatactgcatgtaggcatataacctaaacctgtataaacactaagaaaatagtaacactggccgggtgtggtggctcacacctgtaattctagcactttgggaggccgaggtgggtggatcacaaggtcaagagatcgagaccatcctggccaacatggtgaaaccctgtctctactaaaaatacaaaaattagctgggcgtggtggcacgcgtctgtagtcccagctactcgggagcctgaggcaggagaatcatttaaacccaggagtcggaggttgtggtgagccaagatcgcaccactacactctagcctggcgacagagcgagactccgtctcaaaaaaaagaaaaaaagaaaattgtaacactttgagttggtctggtggaattatctccgaccctttccctgtatccggtgacagcaacaaattcccttctttcctagtttgtctgcttctcgttattgggccacgagaaaacacagccaaacctggcttagttccaggaataagttctcaactagagtctaaactagggtttctcagtttcagggattattgacattttgggtcagatagttctttgtcatgggggtctgacctgtgcattgtcttgccaagtatctcctgtgggacatcttgaccagtggttttcaagagtgggtgatcctcccatcccacccccaggaacatttggcaatgtctagagttgtttcagttatcacaactgaggaggtgctcctagcgtctagtgagcagcggccaggcatgctgttaaactccttgcaactggaggacacaataaataattatttcacagccatagtaaagaatgaaattggccggtcgcggtggctcacgcctgttatcccaccactttgggaggccgaggtgggcagatcacctgaggtcaggagtttgagaccagcctggccaatgtggtgaaaccccgtctctactaaaaatatcaaaattagccaggcatggtagcacgtgcctgtaatcccagctactcaggaggctgaggcaggagaatcgcttgaacctgggaggcggaggttgcagtgagccaagatcatgccattgcattccagcctgagcgacaagagaaaaactccatctcaaaaaaaaaaaaaaaaaaaaaatgaaatcatgtcctttgcaacaacgtggatgaagctggaggccattatcctaagtgaactaactcaaacatagaaaaccaaatatttggctgggtgtgacagctcatgcctgtaatcccagcactttgggaggccgaggcaggtggatcactcgagctcagcagttcgagacaagcctagtctctaccaaaaacacaaaaaattagctgggcatagtggtatgtgcctgtggtcccagctacttgggaatctgaagtgggaggatcacttgaaccagggaggcagaggttgcagtgagctggagtcacaccactgcactccagcctgggttacagagtgagaccccatcacgggaaaaaaaaaaaaaaaaaaaaagtcgggcacagtggctcacgcctgtaatcccagcactttgggagacagaggcgggcagatcacctgaggtcaggagttcgagaccagcctggccaacacggcaaaaccccgtctctactaaaaacatgaaaattagcctgacatggtggcgtgagcctgtaattgcagctactcaggaggctgaggcaggagaatcacttgaacctggggcgaggaggaggttgcagtgagcagagatagcgccactgcactccagcctgggcaacagagtgaggctccatctcaaaaaaaaaaaaaaatttacctattgggtacaatgttcactatttgggtaacaggtacaccactagaagcccaatccccaccaggatgcaatgtaatcatgtaacaaccaaccaggtgtactgcttgggtttaaaattgtgggggaaaaaaaagaaaagaaagaagaaaaaaattatcctgccaggtgcagtggttcatatctgtaatcccagcactttgggaggctgaggcagatggatcacttgagttcaggagtttgagaccagcctggacaacataaggagtccccatctctacaaaaaattaaaaaattatctgggcataatggcacacacctgtggtcccagctatttgggaggatgaggtaggaggatcacttgaacctgggaagtcgaggatgcagtgagccatggtaaccccactgcactccagcctaggcaacaggctgtctcaaaaacaaaaaagaaagaaagcattccctagttccttatttactgctccttctcagtcttcactgacagctcctattccttttccagacctttaaatattagagagcctctggactctattcttggccctctcctctaccctaatccaagctcccatgattccattgtcccttcctttgtcccttaattggattttctgcttctattttttactgatgtggcctaccctctatgaagaaaccagagtgatctttaaaattaccagatgatatcatttacctgctcaaaaccctctgatgcctcctgatcacatgtgggacaaaataaaaagtccttcccatggcctatgaagcctacctggccttgtttctccccacctctctgtcttcatcccttaccactctttctcttgctcactctgctccactcactctgacctcctttctgaatttaacataaaaatccaattcctttctacctcagggcctttgcactctctttttcttttcctggacactctccctccagatacttgcatgactgctcctttatgtcatttatatctgcacaaacatcacctccacaaggaggctttccctcatcacttgattaaatatagtaccatggccaggcacagtggctcttgcttataatctcagcactttgggaggcagaggcaggaggattgcttgaggcctggagattgagaccagcccaggcaacatagtgaaacctcgtctctaaaaaaaaaaaaaaaaattagccagacatggtggcatgaacctgcagtcccagctactcatgaggctgcggtgggaggatcacttaagcccaggaggtcaaggctgcggtgagccatgaccacactactgcactccagcttgggcaacagagcaagactctataaataataataatcatcatcatcaataaatatagcaccatgcatacctgggagcactttctatcccattcccttacccctcaccctgcttcatggtgttcatagcacttgttagtgcctgacattgtattaaattttattgatttttttatcgtctgtcatcttcaattcaatgtaagttaccagagatccaaggctttttccactgccttattcccagcatgtagcacagtgcttggtacaaaggaggccctcagtaaagatttcttggctgggcgcagtggctcacgcctgtaatcccagcactttgggaggctgaggtgggcggatcgtgaggtcacaaatccgagaccagcctgaccaacatggtgaaaccctgtccctactaaaaaaaatacaaaagttagccgggcgtgggggtgcacacctgtagtcccagctactcaggaggctgaggcaggagaatcacttgaacccaggaggcgtaggttgcagtgagccgagatcacgctactgcactccagcctgggtgacagagcgagacgtcatctcaaaacagcaacaagaacaaaaaccaaccaaccaaacaaacaaaattctttgaatcactgaatgaataagtagttcatagagttgtgtgagagaaaaatagctaatatatacaagacatttagaacaatgctgagtattacggtcataatgcatggccagcgtttagtaaggtgaagctgttatcattaaacacttcactgccaaaaaggctgcctccctcctgcttgaaaaccctgactataagggaagcacagcaaaatgctttgggaccaaaaaggagggaggaacgattttgacacaaatcccagcaaaactaaaagccacagaaaccaccaaagctaaacagaaggggaaatttatttagcttttggaaagctagaatttttgtctctcatgcagataataaatggaagagaataagtgcagcatatggttccatgtggtgagtatagaacgcaggggaatgtgagagtgtaaaaacttccaaccagctcaatgcctggtgacagggcagcacaaaggagtattggaatagcctgggaaaactgagactcacagactggagaggaataatcctgggtgttaagtggctttccttacttctcctaccttgtgctgcttcttccacctgcaataaatctcttccatttctttttctttttctttttttctgttttgttttgttttgttttgttttttgagatggagtcttgcgctggcgtcatgctggagtgtagtggcgccatcttggctcactgcaacctccgccccctgggttcaagcgattctcctgcctcaacctcccaagtagctgggactacaggcacatgcgaccacgcccagataatttttgtatttttagtagagacggggtttcaccatgttagccaggatagtctcgatctcttgaccttgtgatccacccgcctcagcctcccaaagtgctgggattacaggcatgagccaccgtgcccggcagtctcttccatttctgcatatcaaatttgcggccctctttcaagtctcaactctctgaagccatccatgaggtattttcagatcaaccccagttgaaaataactcccctgccacttatcactttttcctttgcatctggagcattggctaatctgacttttcactctcattagattactggtggggattctccgtatttgtctccatatttcactggcaaattctgggtattcaataagggctactgaatgaataagaaaaaaattctacttcatccatttagagggcaagcatcatatgctctgtgtgcaggaacaagatgaaacaaccactagctggcaaactacctcaagccagctcctgaacctctccttgggttctgcctcaggttaactcttttttttttttttttttttttttttaaaagacagggtctcactctgttgcccaggctggggtacagtggtgtgatcctagctcactgcagtctcaactcctgggctcaagtaatccttccgccttagcctcctgaatagctaggactacaggtgcaccaccctgcctagctaatttttattttgtagaggcagggtctctatgttgcccaggcttcaggttaggtcttgaatgaaggcaaacaatgcccttctgggatagaacaaggagaataacagagtatggccagtttctctgagccatcttagaaggggaggacccagaaaaaaggaaggagggaagtgactccaggtaagatgtaaatatatttgcaggtaaatccccagaaacttgtcaaatatggtttccctcagtccaattttcttcacttaaaggagtggagaattgttccaaaatggagttaacattctgcaatcatagcagaattattgccctcctcccaagttcttgcattctcctagatgtctctttgacctttttttttttttttgagacggagtttcacactattgcccaggttggagtgcaatggtgtgatcctggctcactgcaacctctgcctcccaggttcaagcgattctcctgcctcagcctcccaagtagctgggattacaggcgcccgctaccacacctggctaatttttatattttattagtagagatggggttttacaatgttgaccaggctggtctcgaactcctgacctcatgtgatctgcccgccttggcctcccaaagtgctgggattacaggcgtgagccactgcacctggccctctttgaccttcttaacccaaagtctcacttttcgagaggtttctgtgtagcaagacggggtaagtatgtcccatttgcattcacacgatttctggaggtattggtgatgttggtccctgcaacaccaaaggaagagagggagcagaggacaatttgtagtgacaagaagagactggatccagtcccttggggaagaagattccttttcatctcttcctctcatgcctgctcatcttccatttcattctcaaatctttaggggaaagggagaggagagagacattgctgtttccccactttccagtccaagcatctatcccaacagataagcaaatttcacttgtcatcctctttatgtatctttctcaaatgtcttgttctctagccaggcttaaggatataatcttcctggtttgtggctctctttcgtcttgattccttgatgactgcctccaaagagctgagctctggcacaattagacttgagggagatagtgtgagtcagtcaacaagcatgtagtatctacactttgggggagagcctatactctttcttatttctttttttacaaattattattttgagacagaatttctcaaattcctttctacctcaggaaaggaaaggaaattggataaggcgactttgtcgccaggctgaagtgcagtggtgtgatctcggctcactgcaacctctgcctcccgggttcaagcgattctcctgcctcagcctcctaagtagctgagactacaggcacacacctccacaccagcctaatttttgtatttttagtaaagacggggtttcaccatgttggcccgactggtctcaaactcctgacctcgagtgatccacccaccttggcctcccaaagtgctgggatgacaggcatgagccactgcgcctggccactctttcctatttctgaatcttcacaggttgttggtcccttcctagtcctgtgtttctcaagttaagactagggggaatctacaggtccatggctatcttctctggggaactcttctaaaactttaagtttgtgcttacctcttgatgggccatatttttaaaaagagaaatattttcatacatgatgatttggattaggttttttttaggggtttcaatgcctatatttgtatttgtgtttatttatttatttattttttgagacagagtcttgctgtgtcgcccaggctggagtgcaatggtgtgatcttggctcactgcaacctccgcctcctgggttcaagcgattcttctgtctcagcctcccaagtagctgggactataggcgtgtgccaccacgccaggctaatttttgaatttttaatagagacggagtttcaccatattgaccttgtgatccgctcgcctcggcctccgtgcagtggcgcgatctcagctcactgcaacctccgcctcccaggttcaagcgattctcctgcctcagtctcctgagtagctgggactacaggcatgcgccacaccagctaatttttgtatttttagtagagacggggtttcaccatgttggccaggctggtctcaaactcctgacctaaagtgatccgcctgccttggcgccgtggctcacgcctgtaatcccaacactttgggaagccgaggtgggcagatcacttctggtcgggagtttgagaccagcctggctgacatggtgaaaccccatcttcactaaaaatacaaaaattagccaggcatggtggcaggtgcctgtcatccccgctacttgggaggctgaggcaggataatcgcttgaacctgggaggcagaggttgtaatgagccgagatctcgccagtgcactccagcctgcgtgacagagtgatactccgtctcaaaaaaaacaaaaaacaaaaaaacaaaaacaaacaaacaaaaccagggagagaattgttttgacacaagtctttggctaatgatgaaaccgtctcccttcctggctgtcctggcatggtttttatagtctgaggcacaatggtgagagcaaacttaagagggagccaaagtgaggtactcaagagagggatccttctttcctggagaactgtggtagcccaggctgtgtaggtagctggacaagcaagactgaatcacaataggtctctacatcttctattaggaggagaacctgcaacatccagtggagcaggtcacaccagttatacatgtaaaatgtaggataaactaaaggggcacagagccaggggagaagacaatgggatgagactgttctagaatctcatcccattggttcattgctgggtgtggtggctcacacctataatcccagcactttgggaggctgagatgggatgatggcttgaggccaggagtttgagaccagcctggtaaacacagcagaccccatctctctaaaaaaaaaaaaaaaaaaagaaaaacatacggtttatgaaccagcagcatctgcattaaccagcttattgaaatgcagaatcacaggccccacaacagacttcctaaatcataatctgcaacttaacaagttccctaggtgatatgtatgcacacttatgtttgaaaagcactaagatttcttgatgaaggaggacttgaaaggcaatgatggatgtgaaaggaaaggtaaagagaagcctcaggtagtcacccaagggacagggccggttggagagagagtcccgaggttttatcctggagaacaccctgtactgaatgagctctgaacataaagatagttagcataggagggcctgaagtctccagataaaaggctgctgccactatcatttaccacgacctctgccattctccactctattgtcatccgcccccagtctccattccaggacttctctacactttgactttttgtttgtttgtttgtttgtttgagacggagtcttgcgctgtcgcccaggctggagcgcagtggcacgatcttggctcaccgcaagctccgccttccgggttcatgccattctcctgcctcagcctcccgggtagctgggactataggtgcccgccaccacgcccagctaattttttgtatttttagtagagacggggtttcaccatgttgtccaggctggtctcgaacccctgacctcaagtgatccccccgccgccccgccccctcccccccgccccgcccccccccgccgcctcggcctcccaaattgctgggattacaggcgtgcgcgatgcccggctttttatttatttatttatttatttttgaggcgggaatcttgctctgtcgccaggctggattgcagtggcaccatctcggctcactgcaacctccgactccctggttcaagcgattctcccacctcagcctcccaagtagctgggattacaggcacacgccaccatgcccagctaactttttgtatttttagtagagacgagatttcaccatgttgccaggatggtctcgatcacctgacctcgtgatccgcccacctcagcctcccagagtctcagttgccaaagctggagtgcaatggcgcgatctcggctcactgcaacctccgcttcccaggtaagccattctcctgcctcagcctcctgggtagctgggatataggcgcccgccatcacgccgagctatttttgcatttttagtagagacggggtttcaccatgttggccaggctggtcttgaactcctgacctcaacctcccaaagtgctgggattacaggcgtgagccaccgcgcccggcccaccttttcttttttttttttttttttttttgtttgagacggagtctctagtctcgctctgtcgcccaggctggagtgcaatggtgtgatctcggctcactgcaacgtctgtctcccgggttcaagcgattctcctgtttcagccttccgagtagttgggattacaggcgcgcgccaccatgacctactaatttttgtatttttagtagagacagggtctcaccatgttggcccactttgactcttgagcagcctggccagcccgaccgcgccaaattctgttcgattctgcctagttcggttgctctggcctagttcagttgctaaggcctggagcttcatggttgcggaggaaatgatgtcacgttcaataggcgggctaaccagattcctcccttctcccgattggctgccaggaatttgactagattcggagtctcgcgggctccagggttagttgtcagtatctttcccagttgttccgccccctacccccgcctcccgcaccgcgcccctctccggctgccctctccgcgtggggcaaggctccgagggcagcattcagtagccatttagctttggaaggagaggtgattcgaatggcccggctcctcctgtcaccatgccaggcactttggccgcgcaggtacttattgacccgaccgggtgtccgtagttggcgcggctaccttaaccgcagggaattgtggaatttatagttctaaattatatgtgggtggaacggggaagctggagcagatttttggaggaaagcaaaactggggactttcaggactaggggcctgggtctcagaagaatgggaaaggacgagaaaggagtctaaataagaaccctgctattagcattgtttggttttcttttcaggtgctgacctgaacctggttcatccctttctgaccaaaactgttcactcaccgtggaagggactaagcatccatatggagacgccaccagtcaatacaattggagaaaaggacacctctcagccgcaacaagagtgggaaaagaaccttcgggagaaccttgattcagttattcagattaggcagcagccccgagaccctcctaccgaaacgcttgagctggaagtaagcccagatccagccagccaaattctagagcatactcaaggagctgaaaaactggttgctgaacttgaaggagactctcataagtctcatggatcaaccagtcagatgccagaggcccttcaagcttctgatctctggtactgccccgatgggagctttgtcaagaagatcgtaatccgtggccatggcttggacaaacccaaactaggctcctgctgccgggtactggctttggggtttcctttcggatcagggccgccagagggctggacagagctaactatgggcgtagggccatggagggaggaaacttggggggagctcatagagaaatgcttggagtccatgtgtcaaggtgaggaagcagagcttcagctgcctgggcactctggacctcctgtcaggctcacactggcatccttcactcaaggccgagactcctgggagctggagactagcgagaaggaagccctggccagggaagaacgtgcaaggggcacagaactatttcgagctgggaaccctgaaggagctgcccgatgctatggacgggctcttcggctgctcctgactttacccccacctggccctccagaacgaactgtccttcatgccaatctggctgcctgtcagttgttgctagggcagcctcagttggcagcccagagctgtgaccgggtgttggagcgggagcctggccatttaaaggccttataccgaaggggggttgcccaggctgcccttgggaacctggaaaaagcaactgctgacctcaagaaggtgctggcgatagatcccaaaaaccgggcagcccaggaggaactggggaaggtggtcattcaggggaagaaccaggatgcagggctggctcagggtctgcgcaagatgtttggctgattaaaagttaaaccttaaaagagacaggaacttgtgaattgtggtctgtgctgtgagatttgggggtggggggccagagggaaggtttcagcccatatcccattctcagcttttggcttcctaggggaggtagcagtggtcacagtgcgccccttttgaggggcttatctatctccgaggacacatagaagctgtctaaactaaacttagtagtggctgggggagatggtggaccttaatactgggtactacatctcccaggcgctttatcactggagcctgtttggcgcatgcgcttggcggtatggcactgtctggaagttacttcctgctgctgtgctcccattgggcccgcctacacagtcatccgcatctgttgattcacgtgctcagcacccaggtctcttactggtcggtagagcttccgggacgcccccttttttgaaagagtcaactgattagttggtgatggggagaggcgggccttgggaaccgtctcctggttggggggtgggggggaaagatggcggagctgatgctgctcagcgagattgctgacccgacgcgtttcttcaccgacaacctgcttagcccggaggactggggtctgcagagtgaggcaccggggaggggagagggctgtggcaaactgtccctgaggcacgcgggaaagaagcgggggcctaaagaggaagtctgggcaaatacggaatccgccatctgaaggagagcggagcagggggctcgttgtgcattaagggggatacaaaagtcagggaagaactctgctccctgctggaacgtcgagttgttccggggtcggggaaggaggggctgaagcgccctggttgtatcacttttcaagtgggcgggcggtgggtctggccgagcggagccaatgagggatggggcgggggcttgtgtgcgatctgtaggctggggccaccgaacgaccccccgacgctcagcatttcttgcagacagcaccttgtattctggcctagatgaagtggccgaggagcagacgcagctcttccgttgcccggagcaggatgtcccggtattgtgtccccagcctttctctaacccttggtgggtggaaagtgagcccagaacctggacccattcacaggccataactcatctggagtcacccctactttctcatcctttctcacactcctgccctcttgtatcctcccttatttagtttgacggcagctccctggacgtggggatggatgtcagcccctctgagcccccatgggaactcctgccgatcttcccaggtaaggtagtctttgtcgttccctcagatttccagaaaccctcatcttcccactgtttcccagaaactacgtagcttcctatatcctcacgcttctacataagtgcctatcctctctccttcaatcccctatttttgtttcttctcccttgctgcggtacaggaatccccaccgacatgtccttgggtactttttggactcttcttaagctctgcttcctgataatttctaactccctttcctccagatcttcaggtgaagtctgagccatcttccccctgctcttcctcctccctcagctccgagtcatcgcgtctctccacagagccatccagcgaggtgagagagccatatccctcttactctctgtgacggggactctgcttcattcccttcacccgtgggtgacaaagaaatgatttaaatgatttgtgtgctatgagtcatgaggtgtgtgaggtgtggggggccttctccactacctttgccgtttccttaatatcttcattttccacatcccctttggttatctagcagtgaagatttttttgtttgtttgttttttgttttttgcttttttttgagatagggcctccctctgtcacccaaactacagtgtagtgacagggtcacagctcactgtagccttgacctcctgagctcaggtgatcctcctgcctcagcctcctgagtagttgggaccacagacacatgccaccatgtctggctaattttttttattgtttgtaaaaatggggtcttcctatgttgcccagagtggacttaaactcctgggctcaagtgatcctcccaccttggcatcccaaagtgcttggattacaggtataagccaccacgcctgatcttgggtctttttaatataaagagttatgtggggctgggaagaagagagttattgactgctgagaattctggaactgttcttgcccaagttgtccactctgaggccatatttgaagtcatgagacttcatcaattctcccagaaataaagtagaaagaatgaacaggttagaaagatggtcagtaccattcagaccagaatgtcaaataattgatggcttgtaagccctaaacttctaaagcttttgttctcgctcttactgtcaacatctcccttgttttttgcccttctttctgccccctgccccacaccaactctcacccaggctcttggggtaggggaggtgctccatgtgaagacagagtccttggcacccccactgtgtctcctgggagatgacccaacatcctcatttgaaaccgtccagatcaatgttatccccacctctgatgattcctcaggtaataaaacagcctgcccccaatccttggctctactacgggagaatgtgttatgtgtgtgtgtgtatgtgtgtagatggaggggaagtgcaggcagcaggacagggagaaaaaggtggggaggggaaatggcagaaaaccaggagggaaggcaggaaggagaggaaacatttcagggaaccacagcaagggcagtgctgaggagatggatattatttttctctctttttcttgttcctagtattctgtcatgccattcaacttactttttaaaaacttgtgagcagtttagggcatatgtatctgtgtgattcccctccacccaacattttattataaacatttttgttgttgttgagacagagtctcacactgtcgctcgggctgaagtgcagtggtgtggtctcagctcactgcaacctccacctcccaggttcaagtgattctcctgtctcagcctcccaagtagctgggattacaggcacccaccaccacgcccagctaattttttgtatttttagtagagatggggtttcaccatgttggccaggctggtcttgaactcctgacctcatgagtcgcctacctccgcctcccaaagtgctgagattacaggcgtgagccatcgcgcccagcccataaacatttttaaacatacagaaaggctagaacaccatatactaaactagattctacaattaacattatttgttctatttttaaagtgttcccaagtttatttactcgtagctgtgtatttagtaaatgtttattgatgtgatcatatctgaggtataataattataaaaaagaaatatttattaagcacctactccatgccagatactgagcagcatgctgggaatgcaaagatgaacaagacctgaccaccatgctgactttcaaaccctgtgatttggtaatgggagaaagacaagtaccagtcaatacaggtgtggtcattctaggatagaaatcactagaggtggggctgggtgtggtggctcatgcttgtaatcccagcactttgggaggccgaggtgggcggatcacgaggtcaggagattgagaccatcctggctaagatggtgaaaccccgtgtctactaaaaatacaaaaaattagcctgtagtcccagctacttgggaggctgaggcaggagaatggcatgaacccgggaggcggagcttgcagtgagccgagatcacgccactgcactccatcctgggcaaaagagcaagactccgtctggaaaaaaaaaaaaaatcactagagggtaccatgaaagctcataagaggggacatttcatccacattggcgctgaatctgggatgtgcccctggaagaagggtttcctgagagttttaaaggacacgtagaaattagccaggaggacagtgtgggggttgacttgtgtctgaggaccctgcatttcttcagagtggatgtaagaaggatttggggagtgatgtggaactgcaggggctacagggccaggtggggcccctgctaaggggctcttagcttttatcctgtggataggtgggggcctttggagaattaagcagggaagtaatatgattaggaagatgattctagtggcaaagtagagaatgggttgcagaggggcagggccagaggcaagagaaccaaggaagaagcttatgcagttgatcaagtaagatgttcggatgtcatgaagaaagcagacttgagaaagaatgaagtggaatagatgagttgtgacctcctggacattggagagaggtaggagtcaaagaggtttgtggctaggatggctgtgggtgggtgatgttactgttcactggatggagactgcaaaagcaggggctttctggtcagggaagatgatgaattcagcgttggacatgttgattctgttgttgttgttgttatggagcttcactcttgttgcccaggctggagtgcaatagtggtgtgatcttggctcactgtaatctctgcctcctgggttcaagcgattctcctgcctcagcctcctgagtagctgggattacaggcatgctccaccacgcctggctaattttgtatttttagtagagacagggcttctttcatgttaggctggtcttgaattcccgacctcaggtgatccacccactttggctcccaaagtgctgggattacaggcgtaagccaccatgcccagttgacatgttgattgttgatttcaaagtaccttctggatctcctggcaccatctctcactggctgaactccaaccagggagcccgctgatgcagtccattcagattctccctggatctcagggagcacagcagggagggatggaaagtggatttggagggacaaacagattatatctagcagattaatacatgttataaaaaagatacacaaaataaggattgaaataccattagcaggccaggcacagtggttcacacctgtaatcccagcactttgggaggccaaggcgggcagatcacgaggtcaggagatcaagaccattcgggctaacacagtgaagcgccatctctactaaaaatacaaaaaattagccaggcatggtggcaggcacctgtagtctcagctactcgggaggctgaggcaggagaatggggtgaacccgggaggcggagcttgcagtgagccgagatcgcccactgctattagcagcaaaaggattgtaaggattgttggtggctttgcattgcatagtgttattagagtcagattctcctccatacttaggtattttttgagggcctgtactttaccctcaatggacatgagacatagttcttgcttttggagagttttgtgagggttataatacatcatggttaaatagttccctttttttttttttttttttttttttgagacagagttttgccctgtcacccaggctagagtgcattggcgtgatctccactcactgcaacctccgtttcctgggtttaagctattgtcctgcctcagcccccctaatagctaggactacaggcacgtgccaccatgtccggctatttttttgtatttttggtagagacagggttttgccatgttgttcaggctggtgtcaaactcctggcttcaagcaatccacctgcgttgggtgtcggcctcccaaagtgctgggattacaggcgtgagccaccatgcccagccatggttaaatagttctgatagtggttatctctgtgtagggaatctgagtgactggaggaccgggaagggaagttttttttttttttttttttgagacagagtctcgctctacccaggctggagtgcagtggcgcaatctcggctcactgcaagctccgccccctgggttcatgccattctcctccctcagtctcccaagttgctgggactacaggcgtccgccaccacgcctggctaatttttctatttttttagtagagacggggtttcaccgtgttagccaggatggtctcgatctcctgacctcgtgatccacctgcctcggcctcccaaagtgctgggattacaggcgtgagccaccgtgccccgccaagattttttttttgacttaattttcctttgttcgtttggatttgtatcatgactgtattatctattcaaaaatataaattgaagttttaaaaagcaatcttagtgatcatataattaagtaccaaagtgaacggtatggaccagaggtagtggtggactgttgacctgtgggctgaatctggccctcagaagggttttatttcaccgacatggggcctagcattttctttcatggagtgatcaacaagtcataaaggcagatttattggaggccatggaggctcagaggtgactgaggctttgctgtttggtgcctgggaggaaaacttgtgtgacggggcaatcaggaagcctcatttatggccagttagatttgggtgactggtgaggcatgagaatggaagggaccagcaggcagcttggaagtcagaatctggtgcaggtgagcagccagggggagatgcacacttggcggttgtcagcatggagatgcattgggcagggataaggtggaaatccagcaagataggaatttgggccatgtgaatgctggagacccccctgccacttcccctgctcaggcctattctatgtgaatagacaagttctgtgaacaagaaagagggaaacgcagaagggcaaagacagctttgaggaacatggagcagggatgagaaaaatcagaggagccactaaaggagaaagggaagcactaggcgaaaagcggggcggagagccagcaggtgagcagctctgtgactgcccctcctggatggcctgtaatctagggccagaagagttttattttcaggttcaaagagaaaggacccatttccccatcttaaccctcttttttatttttttgagatggagttttgctcttcttgcccaggctggagtgcaatggcgcgatcttggctcactgcaacctttgcctcccaggttcaagcgattctcctgcctcagcctcctgagtatctgggacacagggatgcgccaccatgcccgactaattttgtatttttagtagagacggggtttctccatgttggtcaggctggtcttgaactcctgacctcaggtgatctgcccgccttggcctcccaaagtgctgagattacaggcgtgagccaccatgcccagcctcccatcttaaccctcttaacccttcagtgtttacatgatatccagcttttgcctcatcctgcctcccacagatgtccagaccaagatagaacctgtctctccatgttcttccgtcaactctgaggcctccctgctctcagccgactcctccagccaggtgagcaccaccttccttccttcctccaggttttccagtgagttcctcctgacctagaggtatgagagctttcccttcttcagctccttctcctcgacactcttcctgactaatgtatctctggaatgccccacataggcttttataggagaggaggtcctggaagtgaagacagagtccctgtccccttcaggatgcctcctgtgggatgtcccagccccctcacttggagctgtccagatcagcatgggcccatcccttgatggctcctcaggtaatggagtctcctgacacttggaatccctagtgagaggcctttggtcctgacatttcttgttcttttctctcaccttccttcaggcaaagccctgcccacccggaagccgccactgcagcccaaacctgtagtgctaaccactgtcccaatgccatccagagctgtgcctcccagcaccacagtccttctgcagtccctcgtccagccacccccaggtactgaagaaggagaaaagggccgggcatggtggctcacgccggtaatcccagcactttgggaggctgaggcgggcgaatcacctgaggtcagaagtttaagaccagcctggccaacgtggtgaaaccttgtctctactaaaaatacaaaaattagcgtggagtggtggcaggcgcctgtaatcccagctcctcgggaggctgaggcaggagaatcacttgaacccaggaggcggaggttgcagtgagccgagatcatgccactgcactccagcctgggcgacaaagcgagactttgtctcaaaaaaaaaaaaaagaaaaaagaaaaaccaaaaaataaaaataaaaattaattaattaattaaaaaaaaaaggccaggcacagtggctcacgcctgtaatcccagcactttggcaggccaaggcaggcggatcacaaggtcaggagatcgagaccatcctgactaacacagtgaaaccccgtctctactaaaaatacaaaaaaattagccaggcgtggtggcgtgcgtctgtagttccagctgctggggaggctgaggcaggagaatggcgtgaacccgggaggcggagcttgcagtgagccgagatcgcaccactgcactccagcctggtcgacagagcaagactgcatctcaaaaaagaaaaaaaggagaaaaggaggcgggctgcattgaccctgtcagagagcttgcagccattgaggctgcccaatccttgggtgctcttgtgtgggtgtggacacaaggaccccacccagcgcacagccctctgacctctgctcacttgccccagtgtccccagttgtcctcatccagggtgctattcgagtccagcctgaagggccggctccctctctaccacggcctgagaggaagagcatcgttcccgctcctatgcctggaaactcctgcccgcctgaagtggatgtaagtgttggggaggagagaagtagggcgagtgatgggaagggaagagggaagtcttgccatagagagaactgtgggatgaggagggagtcgatacctaggagaaaaaagtgaggaaacggacccattagatcattctgagggtcagaatggactcctgtttctatatgaatatcaactccaggtagttttagggtcctttaggtttgctgtcactgcagatggagaaatggggttggtctccataaattaaaggcaaggaagtcgtactgtactatacgactacggtcatggccatagttggggagggaggctgcctcctaggggaaaatcaggtaaactgtataagcagtataacaaggttaaactttgaaccctacaaatgtgggctgacaggaagaaagagttacgaaggaaagagtttccaccagcatggagaaagttcttcccacactctaacctttcccacctctgaggagcagtagcagggaatgtttgaaagaagggccccttccctagcgtgtttgagtagagaggaaaaacctctctggctatgtaggtgggtcaggaaggcaggggaatggccatgtgagctttgggtaaatcattccttggggtttgagagcatagtctccttctgccaactcatctgtcattcttttttgaccttccgggtgcctaggcaaagctgctgaagcggcagcagcgaatgatcaagaaccgggagtcagcctgccagtcccggagaaagaagaaagagtatctgcagggactggaggctcggctgcaagcagtactggctgacaaccagcagctccgccgagagaatgctgccctccggcggcggctggaggccctgctggctgaagtaagaccagtctgtccctgggagaccaacaggaatacagcctccttggaatgattcccctttttcttgtctccttctttgtaccttagaacagcgagctcaagttagggtctggaaacaggaaggtggtctgcatcatggtcttccttctcttcattgccttcaactttggacctgtcaggtgagaccttccttgcttcactagaaccttccaggtggagcccacgttacagcctcctagctgcctgctttggcccaggccatttccttctgcttatatacaaatggttctggtgtccttggcaccgatgatgtgtctggccagccccttcctgctccattatttgtctttttttcttggagatggagccttgttctgttgcccaggctggagtgcagtggcacgatctcggctcactgcaacctctgcttcctgggttcaagtgattctcctgcctcaacctcccaagtagctgggactacaggcgcacgccaccatgcccggctaattttttgtattttttagtagagacagggtttcactgttgttgcccaggctggtctcgaactcctgagctcaggcagtctgcccacctcagcctcccaaagtgctaggattacaggcttgagccacctcgcctggcctcctgctccattatttttccagtggagagtagatgatggtgataatgctggtagaaatagtgactattaagtgcttactgagttctaggctctaggtgatgcactgtcttttttgtatgtagggaccatccttattcccatcttacagaggcagactcaggcttgtataacagattgcaactcaagcagtccatctgcagagtctttattcttacctagatacttgatacagctgaaattcttcattgtgctcagtccttctttatccacagcatcagtgagcctccttcagctcccatctctcctcggatgaacaagggggagcctcaaccccggagacacttgctggggttctcagagcaagagccagttcagggagttgaacctctccaggggtcctcccagggccctaaggagccccagcccagccccacagaccagcccagtttcaggtgaggagagagagagagggccccctctcgtttgaggatatgagttggtcttctccccgctttcagtgagggggacccaaagctttctcttgccgtcatcgccttctttgttgtgggagtgctgggcagtctccaagtgttgtctccttcctgcttcactccagcaacctgacagccttccctgggggcgccaaggagctactactaagagacctagaccagctcttcctctcctctgattgccggcacttcaaccgcactgagtccctgaggtgtgggattcattgctggggcatccagctcccccggcctcccaaggccttctgcagtcagcctggctggcctgtgtactaaagcgccagtgctccctgccctctcctcactcctgtgggtgggcaaggagggtgggaatcttggcctggcatggaggtcctgagctcctccatttccccaggcttgctgacgagttgagtggctgggtccagcgccaccagagaggccggaggaagatccctcagagggcccaggagagacaggtagggcgggtggctggttcaaggaaggccacttgaagacaagggctaaaggccttgtctggggatttctagtgggcatctcgctgtggaagtttgagggatcgtttgaaggaagtggagggttgagtgggaggtggcatcagcttccaggggctgtttgtctctttcccttttcccttcaccctctccaagtccttagatacttctccttccagaagtctcagccacggaagaagtcacctccagttaaggcagtccccatccaaccccctggacccccagaaaggtgagtgtggggtggggtgcttacttattaagtgaaattccactttcaagagctgtacccccagtagctgtcctgtgcctgtcattactgtcaccagtgggattatacctccctcctccactgggggtctcctgtctttttctctcatcctacccgcttccctggtagaaactgagcattgggcttagttcccctcaaatcctgtttccccacctgcctagggattctgtgggccagctgcaactatatcgccacccagaccgttcgcagccagcattcttggatgcaattgaccgacgggaagacacattttatgttgtctctttccgaagggtgagtttctcctgcccttccatctctgtcaccccaggttcccagcagtctgtcttcagtggggggatgtagagtagggctggggagcttgttggcatctttgcctccacccttctggcctggcccatctgttccccaggaccacctgctgctcccagccatcagccacaacaagacctcccggcccaagatgtccctggtgatgcctgccatggcccccaatggtaactctttccctgctgggtatgggggcagttccaacagggagatccagcctgggagctgagggggaagggggagaggagcagggcatccagagagctgctggacccacaggtgagaagcagcaggaagtaggtggagggaagagcaccatgcaggagacttgggagggagacaagggtgagggtccttccctggtgaaggtgcttgggtagatgactgggcagaggcggggggccgggaacctgctagactctcacttacttttttctcttgatgtcctctcctgtgtgaccccacactcaatgcccttttcttttcctaccctctccttgcccctgcaccaaactctgtccctgccatcctgtttaactcccgctatggatctgcctcctcactattgccctttctttttctctctgctcacctctacttttctgacctcctcccctcctccctgcaatccctgtttgcctccccatctcctcttccttaactctccccttctcacagagaccctgtcaggccgtggggccccgggggactatgaggagatgatgcagatcgagtgtgaggtcatggacaccagggtgattcacatcaagacctccacagtgcccccctcgctccgaaaacagccatccccaaccccaggcaatgccacaggtggccccttgccagtctctgcagccagccaggcccaccaggcctcccaccagcccctctacctcaatcatccctgacctctgccattcacactgacttagaacggggggagggggtaccaggtggccaggtgggactgtttcaaatttccctgatccccaggcttggggcaattggtaaaggaaagagcaggtgtgggggttaagcacttatttgaggtgggggtgttcacctctcttctcatcccttttcagaatatagggctcctctcattcctgtgaacccccagtcctggcttctttgtttgaggggattgtgtgaggttcagttgtggggtgggtggtgagctgctgcatattttttattttgtttctctagtgttatggcagtggaggtgggaatttagtccccaggtgggacaagggaagttttttcattttggagctagttactgggagtaagggagggtggggtgggggggagttcaggtttatgtgtgtgcatttcttttttattattattaaataaacaacttggagggagttgaaggaatggtggctgccttcctggctcgtgatggggagtttgggggaaagtggcttttccagagccagcatcaaagaatcaagcactgaagacatagctggctctgaggtggggtgggtgcgggatcacagaccgcatgtcatccccttgcccccacccctgcaactctggggtatatctgtgtctagcaacgatgtctcatggcgtgacagactagaggatacgcatccctggaatgtgagtcaacaggaaagatggggccccacgcccttcagggtgagcagcctctgggtctcctgctctcgagcaggttctccccctcttcttgctgtccaggatgagcagctcaaacaaacaacaagagctggggccagaggctcagagcccaggaagtgggggtctcggtgaagaaggggtgatatttggaagggaagggggatgtggcaggatatcctctaagccctaaactggaggggactgagacttgagagtccagatgaaagacaaagacaagagtggggcaggcagaaaaagctgtacattcttatgtttttaattttttttttttttttgagacggagtcttgctctctcacccaggctggagtgcagtggcgcgatcttggctcactgcaacctccgcctcttgggttcaagtgattcttctgcctcagcctctcaagtagctgggactacaggtgcacgccaccacacccggctaatttttgtatttttaatagagatagggtttcaccatattggccaggctgcccacttcggcctcccaaagtgctgggattacaggtgtgagccaccatgcctggctaggctgtgcattctaattaggaggaaggggagcaggacaaagtgagggattgagtctgaggccaacctggaagaatccccctccagctgctcctgttcagcagtgcctcaggcctgaccctgcaggagtgtcctgggtcagctggagggtgtgagctgggcctgggctcaatgcccagatgactggacaggggctgcctgggccataagcccaggcctgaaggagggaggaagaacctcatgtgtccagccaggcaacccccacacccctcccactgccctcacccattactgtgtttggggtgaaaacagaccaagtaactatggcaacctggaaccagggatcccaggaactagacctttcctccctccagagggcagcccagcttctcagctatgctttctatcccagagtccttgagccttatccaccgtatctctggagggggtgcagtgagaacaaggattttggaagcacatcacctaagctggattccctaccctgcctttcgttagtagatgtccttaaacattctgagccttagtttgcttatctgtaagatgggatgttcctacctcctaatcagggttgatgacaggatgaaagacgacgtcctcagtgcctggtccataatagatacaccttttcctcatcccttgcccctttctgtccccatctctgttgtccttctctcttccacttttatcccatttgggttcattactgtttcgttgtcccattgtcttcctccttcctgcccccagttcgggaaagtacttgaagtgctggcatctcaggggtcaccctggggtgggacatcctgctcctctgctgattggcaagggacagctggcactttggtgtggatgagacatcagacctctcttggctgagggattgtggtggcaggaaggattgagaaggacggtgagtgggtacctgatgcagggtgaaagccgggcaggctctgggctgctgccttctaggcccatgtggatctccattcctctggccacacccccaaggccactcagcatgccaggtcgctgtcactcctgcacctcattggcccctcctgccctatgcccactttgtctttctgttctgctttccttgtgccaccatctccttcatttcttcctcaggatcccaccttttgttctctctcatccctgacctcatcatccctcccttcctctttctagacttctttcctgcctttctttgctctctacctcattagcagttatcacaacctctttttgaaccattattcatcactgtttttttcttcttttgtatcttccccaccccatccactgcttcactgtcttaaattttttttttaatttaaaaatagaagtggggtctcgctatgttacccaggctggtcttgaactcctggcctcaagcagtcctcccatgttggcctcccaaagtgctaggattacaggcatgagccaccgtgctggccttatttaaaaatatatatatatttttaaattcactgtctttttcctttgtttttcttggtcttctcatctgctgctgctgctgaccctgtgcttgtctcctccctttctcatgccgccccctttctatttcccattctgctccctcgtccacatttcttgcccctttccattatgtcctctcttttcccccactttggtcctctcctcctccttccttcccccactccctttacttcccacaccagttctccatcctcttcccagctgtgggggccagcactggggagcctgatgtttgcctcatcgttctgctatggcttctggatacagcacatctggattccggggcccagatgtgtggttgccacagcgacctgggtccctctggtaaatacaggcgcccacccgcctcagagcagagaacaaaacaattgtgtgactttcttttgtcacgagatagaaatgtccttcctcctcccttctccccacacccatgtctctaggcaaaggaagttttaagggtccaaacccttccttctgaggctcccttgcccccttttcagctgtagcctcttagttctctcccatctttcatcctgcgctctgtctttacattctgtgttccccatcctcacccgacccccagttctcaataatggaatgttgaccacccccttccccatctgatgccatttcttctaagtgaatctacacaataactggatgcagaaaagtttcaaaaatctggattctccacccttctttgtacaagtgcttcaaagaagccacttcatttgttccctaagtcttcaatcctttcctttcctggagttgtttggggagaagagcgaatacaggcttaggaatgagaacacctgggtgagacccaccttcaccactactgacttagccccttgaacaagacccttaatgtctatgagcctccgtttcctcagccacaaagtgggattaatgcccgcactgtgtaggaaactgttttgtaaacggaagcccggcacaagtgttttctatctttcccctctctgggactgctttcttggaccgcagcccctggcatctcttgttcccctgtcttcatccttcaggtccttgccctcaattgcccttactcttatgtgtctgccttctctcctccctatctttcctttccttttctctatctttcatcccttttcctcctgaggtcaggacaggaacttggaggatcattcaaggagggaggctcagagctgaagacacagggactgaggttacagagaacagccggagcttgtggacagttctggacaacactgacctttctacccaccaccacccagacacctcagtgaagccaaccccagctctgaccactgggcttccctgccttcacgcctgggctccttaccctttccccctcctctctcccagtcctttcacatttcagtgttgacttgcatttattggtcacctacactgtgcaaggcttggtgcttttcttacaagatgtgaacatacaagacatgagcttctccatgagcctggaaaccaaagggtgaatcaaatggtaaacaaagataatttcagaacctgaaactatatctgctaagcttccagtggcttccccaaatgccttataagcttgtgtacatctggaatcccacatttctctctgagaccccaacagtgggcttccagaacatcccaggaccatccttcttgctgtcttctctgaggtccctggccactctctgtgccaaatgtacttatgttgaccattcttcctaaataataaagccaggacatagggcataggcacacgcgcgtgcacacacacactaaaggatatgaccatggaacagaaatctgaaggtgtcagaggaaattcataccctgtgttctgccctctgtgtgatactgtctccagaccctccctcttcctatcactgcagggctccccacctcctgccaggagatccttgggaagctgctacctactgctggctctgggggcttcaggccaaggcagaggaaggaagctgagcctggctctgtccaagatgctgacttcatcctccccatcaaagccaggaaaaaaacagccacacacacccagacacacggacacacacggggacacccacgcaaaagcccatgtgtgcctttgccctcggccacatggagcttactgggcatctggccacagccacatgcagtgcaggcacgccctgacccaggaacaccacacacctgccaccatggggatctgacctggtgtgcagacacctgggccgtcacccatgtggcagaatcaagcacatatgggctccctcacgtacctttcacccgtgacttggccaagttacacctcagtggtgaggtctgtagcaggatagagagacccagtcctcactgtgaagctgggggtagtgggttcccactcagctgggatatttctcctctgtagcaaagtctctttttcagctccttgtcagggcagcacatggggagatgaagctagggaaacacccaacagacttatgtggggtgtgtctgtctccctgtcccccctgtcctctggctgtcagtcttctgcctgggaccagagacagcgtgtccgtttcctccagcccctacctctccccgcctctgttcctgctcccccgcagcacccaggcaccagccccccaccctgctttccaccacttcaccctctattcaggtgacccacccttatatttgcctcctgtctctagccctttcttcaaccctaaaccttcctcctaaccttcaggctttccttccttgtccgccccaaccccagcttcctccccaaggcttgtatgtcccagtgttcacccaagcccttgccctgccagtgcccaagcctcacctgctctttctctagggacttgctgaggtaggagaatgcaaagggggcagtgacaggagagggactgaacagaacagacagcaggagtggctcggggacgggataagccgagaagatagaaatggtgggactggagcagggtggggacttggggtcccagagacggtcccagttggagaaagaggttgcctcttgcctcctgccctctgcccctgctccctgccccagactgccaggggagaactggtgagaggatgagggagccagcactgggtgatagacatggggtgcgatccagagatccaagctagagcagtggctgggaagagatgggagaggagcatgggggagggaggggaagggggctggccatgaggaaggatataggctgagaggaaaccactggggtcagagaggaggggcagcaggtggagaaatggtggggaaaaaagaaatggcaggaagggtggggggtgtcaagttgggcaaaaattagggtgagctaaaaatggcatagggaaaggacgtgggaggtaagaccggggctgggggttgagatgagggtatggtgagacagtgatgctagacagggagtgggggctggggtgggggcaggagaagaggaggggtggcatgtgggagggcctgggaggggtgggaggacctgccctatctccgctcccctccctgacctcatcctggtcctccccttctcctcccctgctcgctgcagactccctcctcactgtcgctgccgagatccacagtcggttgtggctcagcccctgttgcaggggacaagtgagggagacttccctgtcctgccctgagacgccgccctcccggggttggggacagagcaggtgcagaggcactgcagctgctcggttgcccaggtaaggaacagagttctggggagacccagaaggagaggcaagggatttctcgcctatccccatgccccaggtgaaggtgtggcaggtgagctctcagcagtgcttccagagcaaggacttctgttcaggacagaggacataggagcattcgctgggaaccaggctccctgtgaaggagtgtctgggaggagagggtggtatgtgtgtgttggggtgggcagtatgtgtcagggtttggatgggatgcagacaactgagaggggctgggaacaaaccgagggactccgggagtcagatggtggaaccagggtagaggtggttattggtgaggtgagcccctgggccctggaggtgctggggctagcgggaagataggactaggctgaactggtggccagctgaaccttggaaggaaagtgcttgcggaatcccaaatgtcgggctagagcagctgagcccaggctctgggggctccaggctccaggaggtgccagagggtgcttctttgggcatccaaatggggactccctaggtggcagcgtgagagttgcagggagggaggtctgggagatctctttaggaaatactgaaatgggacagtcaggactcgggtctgggacgtgcacagagcctgcagagaggatcctaaaacttgttcttggccagagctctgcactcatgactcacggttcagcagggctgggatggctgagagatgcctctgggggcacaggggctccgtcttcactctgtgccccttccaggctccccttgcctctgtctgtctgaacccgcactctccctcacctcgccgcccccgccccccaccaccagtacacgtgacacgccccgggtgggaagggcgggccccttatctcgcctggaaagaatttaatggcatagaaacaactggaagtggaactgagaggaactactgggaagcaactcggaaacaccacagctgctgcctgccctgcccctgcttcccgcatctccagcccctcctcttttccctgaccctgccttcaagtccctggggacccagcacctcaattcctcaaacttcctttgctcactccagacctagccactaggtgcaggaccagaaactgccttcctgtctctcattgcacccctaaccattttcagctggggcctggaaatcctttctcttaatttttccattcccaggccgattagctccccagaataaggggtatctggattccccaacctacccctccctgacacctccttcctacctggttccagcccaatatctgagacccccacattccctttttagtctcactcctagaatccttctaccttcacctctcattgccagattcaactgagggtgtagcaggagggtcagagggaggcatgggggcaggaccagaacccccatctgtggaacatcttttatggaagccagcccctctccccaccccttgggacctatacagtccctaatgagcaaagtgtcaaagttggctacaacacaaaatacccaggaagctgagtcacagtttgggaagatgcccccatccctgccagccctccaactgtggggagggtgccaagagggtgaggccatatctctctccaaacacacactacagagaaccaccccagacatagtggcagggggaatggtgaaggggagacacaagagacacccaattctttgcttgcccagtaccgagagaagagcagaattatcccaggagctggaatggggagctggagggctgggtggtggcaacagggcagggagggagattgggaaggagcctctgggtgtgtggtcaatggaggctgctctgctcttctagaccaatctcaccagctttccagaaaagctggtgagctctcttcactccttcctggtgcaaagaccctctctgctttcccccactgtgcagggaaagatgaggaatccacttatttggggaggggcactggacaactcacagaggcctccaggggtacggggaagtatggtggaggccatgtgtccgctgcttcccactgggaagggcctcctgctttgttcctctcacaccatccaggttctttcactcacagagctgccctcggagccaacaagaaatcagccttcttaggcatcacccaatgactaggtgtggaggaaacctgaaggggagattgggtgtgtgtgcacgtgtgtgcatgggcacccatatgtgtacctacaaggatgcaggttttgggggtggatttgtgtgtctgtgcaggtatgtttgtacttgtggatgagcacacattaatatatttgtaagtgtacatgtgtacacatctttgtgcaagcattcccagggtgtgggagtgattagcatggccttagacacaaagtgacaggatttgagggtcggtcagagcccatctcttacccaaggctacactccaggctgacagaagggctggggagacaggaaagggcagctctctgtatgccaggcctctcggcctgggctttcttgggtggggagcctcttggtgtggaaacactctgtccctgttcagctccctttccgtctcttgctggctggtagcagaatgtgatggctggtagccccaattactcctttttctctgatccaggagaaaagtttaagagtagaaagccagaagatgtgtgcgtgttgggtggaggtgtgtgtgtgtcacagtcacctccgcctaccagtgacacatcccccactcctcaccggtcagcatttccacacccaccctgccctcctcctttccccagcctctggtctggaagagctgggcacctttcaacatctctcctcaactcttcaccctagctgaatcctgactggccccctcacactcaggtttgccatagccctgtctcctgtcttatcctgggacccccctaccacctttcctcccacctcttgtctctgtgtgctccccaatccctgcctcagtaaactccacaaacacatacaactgggtaaccgtcatccagatcaagaaacaagacacctttagcaccccagaagccccccgccccatgcccctactagtcactaccccctcaagagtatcacacttctgacttggagcactacagattaatgttgcctctcctcaaacttcacataaatagaactgtgcagcatgctctttcctgtgtctggcttttgttcaacatcatcttagtaagatccatcacactactgcatataactatagttcattcctgctttattttattccacggtgtgaataaaccacaatttatttattctactgatgtgaaatgtttgagtagttcccagtttggggctattatgagctatgttgggtatattcctaggagtggaattgcggggtcatagggtttgcatgtgttcacctttagtacatttagtagattctgtcaaacagttttccaaagtgcttgtaccatctggtcctgccaggatcttccctggcctggcctctgattctgcctcagccctggtggctgtgtctaaccaacttccagtcccagacactgtccgtggtcctagccctgaccttggtcctgcccttggttccagccttaatgctagtcctgcgtttacattgaacttttcattcattcatatagtcggtaaatatttattgagcaccagttatgtgccagatgcagggatacagcagccaagaaaaaaaaataggtgccatgcctgccctcatggactttatagtctagtgggcaagaaagtaataaaataatctcacagtatatttattattactttggacttcaaaaaaatatttgtttatatatgattgcaaattgttataaacgctacacatgagaatggcatgatgctgtgatatcacatgataggaggacctgacctggtcaggaaaacttccctgtgaaaaaaatggcgggctgagacctgaaggatgagaaggccaagagagaagggaacagtgttccacacggatggaacagagtatacaaagatctggggttggggatgggcacagagagtatgagggacttgaaggtcagtggagctggaatggagggagggagggaaatgttatgggtggtgaagtgggagcaggggatacatgatggtagggctgtttgtcagtgttctaagagaatttggaagggagacactgaagcattttgaggatagggacatcctgattgcgtttgtgagactgtagagggcaagagtggaagcagagggaagggtcagggctggacacagtggctcacgcctgtaatcccagcacattgggaggctagggtgggaggattgcttgagtccaagagttcaaggccagcccgagcaacatagaaagatcctgtctttgcaaaaaaaattaaaaattagctgagcgtgatggcacacacctgtagtcccaactactcaggaggctgaggtgggaggattgcttgagcaacaggaggtcaatgctgcagcgagctatgatcgcaccactgcacaccagcctaggtgacagagtgagaccctgtctcaaaaaaaaagaaaaaaaaagcagccaggaggcaattgcagttgtcaggcaagaggcggatggaagcttggattagaatgaaggtaagtgggagagaaggaaatgaattaaagagatgtttatgagaaaatacaggtagatacaaggaaatatggtagccttgaatgggctattaggtttctggcttgtaaagctggatgaatggtggggtcctgagcttcaatggggaattctgggaggggatgggatacaggaaggtgaccgtgagttcaggttacaggcatggtgaatttgaggtgcccaagtggagatgccaagtaggcaggtggatatattgctgtggagcgagaggaagatgactggggtgttttacaaattggtgtatagtttggaaattgaagttataagtctggatgaaggtaccaggtggatgactagagcagtaggtctattaatttagtagaaatttgttgcacattacaatcatctggggagcttttaaaaatactgagtaaaattcacttacttggtcgttctagtcacatctcaagtgttgcagagcctcatatccctcctggctaccatattggtcagcgtggatacagaatgttttaaaagagaagggccaggtgtggtggctcatgcctgtaaccccagcactttgggaggccgaggtgggcagatcacctgagctgaggagctcaagaccagcctggtcaagatggtgaaacctcgtctctactaaaaataaaaaattagctaggtgtggtagcgggtgcctgtagtcccagctactcgggaggctgaggcaggagaatcacttgaaccccaggaggcagaggttgcattgagccaagatcgtgccactgcactccagcctgggcgacagagtgagactccatctcaaaaaaaaaaaaaaaaaaaaagatgcggtgaactgtgtctagtgattttgagagaagtcaaaggtcaagcaagatgaagacaaatgtcccttagattttgtggcaccgaagtcattgggaagccctagagggagctgtttggtgggttggagggagtagagtggattgaggcatgcataggctataaggaaatgtaaacatcaaatacaaataaattttgacaactgtggccatgaagtagaggagagaaatatgtggtggctggagggggtgtgagattggggataggttttttaaggtttcatttttttttttttttgagatggagtctcgctctgttgcccaggctggagtgcagtggcacaatctcaactcactgcaacctttgcctcccaggttcaagcgattctcccgcctcagcctcccaagtagctgggattacaggcacctgccaccatgcccagctaatttttttttattttttatttttagtagagacggggtttcaccatgatcgccaggctggttttgaactcctgacctcaagtgatccgcctaccttggcctcccaaagtactgagattacaggcatgagccaccacacccagccatggttcaatttttatacagcaaaatgccaaagtcttaagtgtgcagctcaatgagtttttgaatatgtatatatctgtgtaaccacccagattaagatacaaaatatttccagaaatatgactccttccggtcaataatccctacaagtaatctgatcctatcttctaaaagcaaagattaactctgcctgtttttgtttgtttttttgtttgttttttgacatagagtcttgatctgttgccaggctggagtgcagtggcattatcttggttcactgcaacctccgcctctgggattcaagcaattcttttgccttagcctcccaggtagctgggactacaggtgtgtgccaccatgcccagctaatttttgtatttttagtagagacagggtttcaccgtgttggccaggatggtctcgatctcttgacctcgtgatccgcccgcctcggcttcccaaagtgccgggattacaggcatgagccactgcacccagcctctgcctgtttttgaacctcatataaacggcattattcagagtgttttcttttttcttttttctttttttggtagctcaggaagggtatataagagtataagagcattctctttctgtgtgtgatattttttactcagcactatgtgtgtgaaattcacccatgttgcatgtagcaatagggtgttttttattgctgtatagtattccattgtatgactctggcacaatttatttatccactttatgaatggacacttgagttgctttcagttttagctaatataggaataaatctcatgaacattatggtctacgtcttttggaagaactatgcagtcattcccaccggatatttagttatagatatctgggttatagactatatgttttagcagatactaccaaacaactttccagtgtttgcattaatatatgctcccacttgcaacagatgacaattccagctgcttcacattcttgccaatatcaagcaatgacagcctctttgaagagggacaagcattctggaggatatttagtggcatcttattgtggttttaacgtacatttacccgataactagtgattttgtgcatcttttaaaatgctgcttggatctgggtgcagtggctcacacctgtaagcccaactactgtggagggtgaggcaggaggattgcttgaggccaggagttcaaggccagcctgggcaacacagcaagatcccatctctacaaaaaatttaaaaattagccaggcatggtgatgcccatctgtagttccagctactctggaggctgaggcaggaggatcacttgagcccaggagtttgaggctgcagtgagctgtgattgtgccactgtgcttcagcctgggtgacagaggtagagtttatcttaaaataaaatgaaatagggtgggtgtggtggcccatgcctgtaatcctaataactttgggaggccaaggcagatcacttgaggtcaggagtttgagaccagcctggccaacttggtgaaaccctgtctctactaaaaaaaaaaaaaaaaaaaaggctgggtgcggtggctcacgcctgtaatcccagcactgtgggaggccaaggtgggcggatcacgaggtcaggagatcgagaccatcctggctaacacggtgaaacctcatctctactaaaaatacaaaaaaatgagccaagtatggtggtgggcgcctgtagtcccagctactcaggaggctgaggcaggagaatggcatgaacctggtaggcagagcttgcagtgagccaagacgcaccactgcactccagcctgggcgaaagagcaagactccatctctacaaaaaaaatgagctgggcatgtggcgcatgcctgtatcctagctactccagaggctgaggtaggagaatcacttgagcccaggtaaaataaataaaatgtttattggctctttggctatattcttttctggagtacctgtttgtcttttgacaatttaaaaaactaggtttcctgattttggcttattttgttttgcagagattttttttttattttttttttttttgagatggagtttcactcttcctctcaggctgaagtgaagtggcatgatctcagctcactgcaacctccgcctccagtttcaagcgattctcctcctcagcctcccgagtagctgggactacaggtgcccgctaccacgcccagctaatttttgtatttttagtagagatggggtttcaccatgttggccaggctggtcttgaactcttgacctcatgatccgcccacttcagcctcccaaagtgctgggatttcaggtgtgaaccaccacacccagctgccttcttattctcttaatgatgtaatttgatgacctgaaattttgttttgtttttttctttttcttttttttgaaacagagtatcagctctgttgcccaggctggagtgcagtggcatgatcacagctcaccacagcctcgacctcccagactcaagtaatcctcccacctcagcccctgagtagctgggactacaggtgtaccaccacgcccagtgaattctttttgttttttgtagagacagagtctcactatcttacccaggctggtctccaactcctgggctcatgcaatcctcacacttaagcctcctgaagtgctgggattacagatacgagccactgcacccggcctatggttaggttttgtgtgtgttttacttaagaaatcttgcggctgggtgcagtgactcaagcctgtaatcctagcactttgggaagccgaggcgggcggattgcctgagttcaggagtttgagaccagcctggccaacatagtgaagccccgtctctactaaaaatacaaaaaatagctgggtgtgggagcagatgcctgtaatccccgctactcaggaggctgaggtaggagaatcacttgaacctgggagacggaggttgcagtgagccgagatagcaccagtgtactccactctgggcgacagagcaagactcagtcttaaaaaaaaaaaaaaagaaatcttgcttactccaaggtcagaaattttctgtaagatattgctatgaaagatattgctttacttttcttatttaggtcctgggttcatctcaaattaatttcggtatatcagacataaggtggagaatgactgtttttttttttttttttttttttttacttagggatgttggattgacccagcaccaggaactaaaaagaccatcctttctcctcttaactgcaggggcacttttgtcgttaattagttgaccacatatgtgtgggcctgtttctgggccctattctgtttcatctgtctatccttgcacctttaaaataagtcttgatatttgatcatgtaagtcctgaggaagaggatttttgttttttttttttcaattggagatatttgagcaaggatccagttgagagtgaggagttgaataaaaaagagagagaagccaagcatggtggctcatgcttttaatcccagctacctgggaggctgaggtgggaggatggcttgagcccaggagttcaagtccagcttcaaccagggggttgagcaagatcctgtctctatattagaaagaggtcgtgcggtgactcatgcctgtaatcccagcactttgggaggccaaggcgggcacatcacttgtggtcaggagttcgagaccagcctgcctacatggtgaaacctcatttctactaaaaatacaaaaattagctgggcatggaggtgggcacctataatcccagctactcaggaggccgaggcaggaaaatcacttgagctaggagacagaggttgcagtgagccgagatcgcaccactgcactccagcctgggcgacagagtaagattccatctcaaaaaaaaaaaaaaaagtgagagagagagggagaagataatctgcacttttcttagaagacagtaggagctgggatccaggtgtttggggaaggattggccctaggtactcatccactaattcattcaacattgatgtgtcagatagaacatttatgtgccagacacaagtatacagcagtcctgggatagatgaggtccttgttctcatggagctcccattgtagcattgagagaaaggtaataagtaaactgataactcaggcagcagtaaatgccatgaagaacaggaacaggatattgtgatagagagtaatggaagactgccctaactgggagttaagatttgaagatggagccagcctttatgagcagagtgaagagcatcccagacatagggaacacacaatgcaaaggcccttggagtagtgagagcttgtagtgctcgtgggaaaaacaaaagaccagtgtagagccgggtgcggtggctcatgcctgtaatcccagcactttgggaggctgaggcgagcagatcacctgaggttaggagtctgagaccagcctgaccgacatggagaaacccggtctctactaaaagtacaaaattagccaggcatggtggggcatgcctgtaatcccagctactcaggaggctgaggcaggagaatcgcttggacctgggaggcggaggttgtggtgagctgagatcgcaccactgcactccagcctgggcaataagagtgaaactccgtctcaaacaaacaaacaaaacaaaacaaaacaaaacaaaacaaaaaaaccagtgtaggagaacacaatagaaaagggggtgaggagcagggtaaataaatgatatcagagaggtagagaacagacttgcccagggagggtatcctttagggttgggcggaatgtgaatttttacatgcatgtgagttgggtagattacttgtgggtggtgggaccgtgggtatgtgctggagaaggggggattcattttgtctcctttttgaagctgctctcatacctaccctttctccctgcagcctcctgaatgatgccagcccagtatgctctaacctccagcctggttctcctggtgctgctgagcacagccagagcaggccccttctcttcacggtccaatgtgacactgccagccccccggccccctccccagccagggggccacacagtgggggctggagtgggaagcccctcttctcagctttacgagcacacagtggaaggaggggagaagcaggtggtattcacccaccgcattaacctgcccccttccactggctgtggctgtcccccaggcaccgagcccccagtccttgcttcagaggtacaggccctgagggtccgtctagagatcctggaggagttggtgaaggggctcaaggaacagtgcactgggggatgttgtcctgcctctgcccaagctggcacaggtgagcaggtgatcacagaagagggtggagaggtggggtggggtgggcattgctagtccataaaggtccttggtatgaattagaagaaggcactccttcctcaccatgaggggtgtggatgcagcccagaacacaacttggagagcagagctgggctacatgtcaaccaaagcatatgcgagggccctgagaggctgcatacattacacatactagcaactgggagcagacatggccttatgagatgaggctagcctggctaggggcctgcacataggagcactacataggctcagcctctctcccaggagagagactgagacttgcctctcccctcctactccaggtcagacagatgtgcggaccctctgcagtctccatggtgtgtttgatctgagccgctgcacctgttcctgtgagccaggctggggtgggcccacctgctcagaccccacagatgctgagatccctccctcttccccaccctcagcctcggggtcctgcccagatgactgcaatgatcagggtcgctgtgtccgtggtcgttgcgtgtgctttcccggctacactggccccagctgtggctggccatcctgtcccggggactgccaaggccgtgggcgctgcgtgcagggcgtgtgtgtgtgccgggcaggcttctcaggccccgactgcagccagcgctcctgccctcgaggttgcagccagaggggacgctgtgagggtgggcgctgcgtgtgtgacccaggctacactggtgacgactgtggcatgaggagctgccctcgcggttgcagtcagagggggcgctgtgagaatgggcgctgcgtgtgtaaccccggctacactggcgaggactgtggggtgaggagctgccctcggggctgcagccagcggggacgctgcaaggacgggcgctgcgtgtgtgaccccggctacactggcgaggactgtggtacgcggagctgcccctgggactgtggcgagggcgggcgctgcgtggacggccgctgcgtgtgctggcccgggtacacaggcgaggactgcagcacgcggacatgtccgagggactgccggggccgcgggcgctgcgaggacggcgaatgcatttgcgacacgggctacagcggggacgactgcggcgtgcgcagctgccctggcgactgcaaccaaaggggccgctgcgaggacggccgctgcgtgtgctggccggggtacactggaaccgattgcggctcgcgcgcctgcccacgcgactgtagaggtcgcgggcgctgcgagaacggcgtgtgtgtttgcaatgcgggctacagcggcgaggactgcggtgtgcgcagctgtcctggggactgtcgtggccggggccgctgtgagagtggccgctgcatgtgttggccggggtacacaggccgggactgcggcacgcgcgcctgtcctggcgactgtcgcgggcgcgggcgctgcgtggatggccgctgcgtgtgcaacccgggcttcaccggtgaggactgtgggagccgtcgctgtcccggggactgccgtgggcacggcctttgcgaggatggcgtgtgcgtgtgtgacgcaggctactcaggggaagactgcagcacgcgcagctgccccgggggctgccgaggccgcggccagtgcctagatgggcggtgtgtgtgcgaggacggctactctggcgaggattgcggtgtgaggcagtgcccgaatgactgcagccagcacggcgtgtgccaggacggtgtgtgcatctgttgggaaggctacgtgagtgaggactgcagcatccgcacctgcccctccaactgccacgggaggggccgctgtgaggaagggcgctgcctgtgcgacccaggctacaccggccctacctgtgccacccgcatgtgcccggctgactgccggggacgtgggcggtgtgtgcaaggagtgtgcctgtgccacgtgggctatggcggtgaggactgcgggcaggaagagcctccagccagcgcctgccctggaggctgcgggccccgggaactgtgccgggcaggccagtgtgtgtgtgtagagggcttccgaggccctgactgtgccatccagacatgcccaggggactgccgtggccgaggagagtgtcacgatggcagctgtgtctgcaaagatgggtatgctggcgaagactgcggagaaggtgagcaggcagccttccccagtgtactctgggactgtgattctgtgaacaggagccatggggaagacctgagcctgaggaagagtggagggagagcatgtcattccaaggagccagtgcccaccaggggcagcagaaccacaggggtggggctttccagtgggcaggactggccttcagatctctgaggagcaggttggggcccatttagttgcatttagggagattctgtgctcctgaagatggagagaaggtgaaggcgatccaagccccgttcagccctctgtcagctattctccactagcagagaggagtgggagttaggatgggcctcttcgatgtccctgagtaaaaggggctgtgggtgggggtggttgccttgtgctaaccagctttccctaacccattctcttgggcagaggtgccaaccattgagggcatgaggatgcatctcttggaggagacaacagttcggacagagtggaccccggctcctggccccgtggatgcctatgaaattcagttcatccccacggtgagagagatgccaggctccaggaggggactgagtgggcaggacaggggggcagggctcacctcctggaggaagttccaggtgatcattggttgagtccagatggctgggtacctgaagctgctgtaaaggctttcttagcctgcttgacactgggcactgaggcctctgcagcatctccagcaagcattggtcccacacagttggaacacctggtaacagagagctcagtacttcctgaggctgtccagtccattgttggtcatcactgttagctgttatcattgttgcagaatccgtctgcccctattctagcacctgtccgttggccctagctgggtattcatcagcagctggaatgttttttgctttccctgtgtcctacaccacaggccttcaggtatttggagacaccagcctgatgtcttcattcctcaggcaaaacctcccagtttcttcgccccttttccctaagtctttattctctgaatcctttaccttcctgtgattcttgcttttttcatgtgcccccaaaatgtggggacagagaggggcccactgacttactctgaatttatggacacttttctcagagctggcgtatagcaatttgtagtcacacaagcaggcagctgttttggtcatatttggttttttaagtaacttttaattataaaagtaatataggccccgtgcagaaaacttagaaaatacagattagcagggaaaaaagatggaaggaaagaagacaacattcaactatatacacttttttttttttcacctaaatataggcctttgcatttggccctgttcaatgttatcttttttggtttgggccaagctgtctaggctgttgcaataattttgagtctgtgaacttcatctcccacctccttgtcatcagtacatgcaaaccagttttttctctgtctccctccaacttgctctttttttttttttttttttttttttttttgagacagagagtctcactctgtggcccaggctcgagtgcagtggtgccatctcagctcactgcaacctctgcatcccaggcttaggtcatcctcttacctcagcctcccaagtagctgggactacaggtgtgcaccaccttagcctgctaatgtttgtatttttagtagagacggggtttctccatgttgcatgcccaggctggtcctgaactcctgggctcaagtgatctgcccgcctcagcctcccaaagtgctgggattacaggcatgagccaccactcctggccatccaacttgctcttaaaacattagagggaacaccctaaggacaaagccttgtggtcacttatttggggcctccctttgtgcagactgggcttttaagatatggtcgtttccccagctgcaaatcttctgacatttctaccatccaactcatgttttcctgcatcatcccacaaatgccatatggggtgtgggccatgtcatcctcatcttcatcagcttagccaggactctgtaaaaataaacaactccctgggcctaaagcctcggaaggcactaggacagaaggggacagctcagaggaactgtcatcctcactccactttgctttgtcttgtcattatgctcctcaggccagccccctactatgttctgcctctcctcactctccagccaaagcagaagcagaaatctcaacttcgtggcgcaaccaagatagcttgaattttttcttctgtttaaacatctttttttgttgttgttataaaaatactttaatcacgagacaagaatttggcaactagagaaaagaaaaacaattcctggctgctcctcactaaaacaagcactgctaacattttaaagtgtttctcccactctcttcttctctgtatatattatttacatagctctaatcttgaaagggtgggacttcgaaaaggaagtttcttaagaaatttcagggaaagaagaattaaaataaacacttgagataagaggagcttttagggcagcagttgtctcctgctctgagtaaataaatacaaaccgatccttggtgttgtcaagggcgccgctttccagttgaagccctagactttctccctcactcagagccaggatggtggtgccaagttggcctgtgccaggcttggccatgttcttagctcatccattctgctctcggtatgggcatctgtcacattctgggtcttctctgagcctgggtgtggaaaacactcctgtaaaattggtccccagacactcctcttgggcctgggctacccaccctcagaccatgctttctgctgtctgtagctggtccctggcatcgtaccttctgccttggcaagtgccatctatttcttttcttttctttctttcttttttttttttttgagacagagttttgctcttgttgctcaggctggagtgcaatggcgcaatctcggctcactgcaacctctgcttcccaggttcaaacgattctcctgcctcagcctcccaagtagctgggattacagacacctgccacaatgcccagctaccctttgtccatttctgtgggtacagagtatattcaatagctgtctgtcctctggctgctgctgtcatcctagaagcctatctctacctcttaccttccctcttcccagaagcacttctctctcaaagcccaaactctgctattccagatcaagggacatacctagttattggaattatttttcagaatgcagaagaagaaagtttctcctctccctgtatatgtggcactgttactctgactcagtggttctcaaagtgtgttccctggacctgcagcatcagcatcacctgggagtatgttaggcatgcaaattgtcagactcccccactagatctactgagtcagaaagtctgggcacagagcccagtaacctgtattgcaacaagccctccaggtgattctgatgcccctccagcctgaggccccctaagtgaaggaatgttgctattttgcaaagtgctagctccactatgaatgtgagagaaagcatggggaaactgagggagatgagttcctgaatgagaaagaggttcagatattccttgtctgggtgtgtcctgcagcctggaaatcagggctaggctaagtgttcactgggactcaaaacctcacagcctcagagaagtttttgcttgggtctagtctaaaaacagcaatgagggtgagataagctccaaggaccagccaaggtagagttcatctggagccacgaggttaatattgagataaactctaaaacttcccaagaacaaaatcagtgaagcaggccaggcgcagtggctcatgcctgtaatcccagcactttgggaggccaaagtgggtggatcatctgaggtcaggagtttgagaacagcctgaccaacatagtgaaaccccatctctactaaaaatacaaaattagctgagcatggtggtatatgcctgtaatcccagctacttgggaggctaaggaagaatcccttgaatcttggaggcggaggttgtagtgagctgagatcgtgccattgcactccagcctgggagacaagagcgaaattccgtctcaaaaaaaaaaaaaatcagtgaagcagccaagctttaccaaggggcagagccagctgccagcatctgtttagaaagactgcttcagggccaggtgtggtggctcacgcctgtaatcccagcactttgggaggctgaggtgggtggatcacctgaggtcgggagttcgagaccagcctgaccaacatggagaaaccccgtctctactaaaaatacaaaattagccggacatggtggcgcatgcctgtaatcccagctactcgggaggctgaggcaggagaatcgcttgaacccgggaggcggagctcgcgatgagctgagatcgcgccattgcactccagcctgggcaacaagagcaaaactccctctcaaaaaaagaaaaaagaaagcctgcttcagaccagtaagatggtgctaggagacgtaggagacatgggttaggttgatggactttcaggggactgttcccagatggatctcaggaggaaccaagaagtgtctaaaggatatatatagggagaaggagaactctggggataggcttgcctcactgaaagaaccagacatcatcagggagcatccaaggtgtgtgtattgcggctgtggggatggggtgggtgtggataaagagaaagagacatacacacacacagagaaaatgaacaaataaattctgggaagggtaaggatttcatgggtcttgagttgaggccaacccaaggcttcctaggctggggtattctaaggcagggtgaataggagagggctggaggtcctatgtgcccaggaaaacttttcaacccagaaaactgacaaagctttacttcatcctcaacccagaaatctctacgtggccttctcatctggttttatacttcggtatttactatgttgatttccccacagttctcttggtttaggagagtaccttttgaaatttccaatcctacttggctgaatggaggtgtccccatcacagccaacatagctaggcagaacacagcatccttagcggctgtcctagctggacagcacagcaaaatgtggggctgttagaatgctcacagatgtacagttcctcctgtttccccagtggtgggcattccaggagaccctgcctggagcagggtccagtagattccctttggaggcaccacacataatcataattccttaaatgtacacttgtaggagtgttgttttctcacaagcatttgctaagcatagagattgttgtaagtatctcatatattcaagatgtggccatacatttagctattagagtctcagctacctgaggacagggaccatatattttatttttgtgtctccaatgcccagcatgatgccaggtacaaaatcaacaatcaggaaacatatttgtggaactttgagcaggtggttcttgttttgaggagcctacaacccgggtgaagagacaagaaaagtccctcaagggaaaggttgtgatgcgggtcccactcctgttacacagccatgagcaggcatctacgaggaggttcagggtgaggcagaccctttaaggagaaagtgcaacttgaaggggcatccttgatctacttcatttgttctgacaggaccaagcttaggaaaaggctcctcatgcccaggtagtcagagttgccagggcaaagctggagggagagtcctggtgcatgttgggtggaattctggcagatgaacacggggtgcccatgagaggggactctgacagataaatagggggtgcccatgagaggggactctgggatcacactgctagggcctaaattcttgccattttcttggtgttggtgacgttggcaagatacttgtccttctgtgtctcagtttccttatctgtaaaatgggactaataggacctgtttcgtagggttgttgtgagaattaagtgagttcatgtgtgtacctcgcctagaacagtggctcacaaggagttagcgctctcagcatgtttgctccccagcttgtacagggtcaagttccacacagtaccatgctgacactgtttagaattggagaaagaagagataagggggattgagcagcagaggcaagagtgccagcccctgagccacctggtgctctctctcacagacagagggggcgagccccccattcacagcacgggttccaagctctgcctcagcctatgaccagagaggactggcccctggacaggagtaccaggtcactgtccgagcccttcgagggaccagctggggccttcctgcctccaagaccatcaccaccagtgagagctggggctgtggggaggggtgtcctgagtggagatctggactagagagggaatctgccctccgggagggcagaaggaaggggctggatgggggctaggctcttggaaggaaagatgatgattgaagaaccagacacccacctgagtcctcctctttaacctggctagtgatcgatgggccccaggacctccgagtggtggctgtgacaccgacaacactggagcttggctggctgcgtccccaggctgaggtggaccgatttgtggtgtcctacgtcagtgccggcaaccagagggtgaggctggaagtgccccctgaagcagacgggacgctgctgactgacctgatgccaggcgtagaatatgtggtgactgtcacagcggagcggggccgggcagtcagctacccagcttctgtcagggccaacacaggtatggctggccagaggttagggaagggccctggtttcccagccttggatcctcctcctcaggagcccaggctcagggctcacagactcctctgaatgcttctggcaggtgtgtggcagtctcgaggcacctgctgggggccttgctctgtcctgaggccactggggagacagagccctcagatgcctggagtcctgtaggaaggttacaggttagcctatgaaaggaatggccccagggagagaagtgaataggagatgctgcctgatccagtcagttaagggaggttcttttttaaatttaggtaccgggacaggccttgtgctgatagatcttgtgggactggaattaggcagattagagatcatcagtcctgttgacttttggattgggattgctgggaggtgggtctcacagcagtgattttccactaaacctcgaggtttcttaacagatacctggatatttttcttttcctgtgacagggggacacccacctcgctgtagctcatgttctcttccccgactcccctttctctccttcagctacagggccccacccacgggcttctctcttctttctagggcaccaacagtggtgggcttggaggggaatgggggggctgcgggacactgaccgatttccctccgttctctttccaggtggggctggggcacagggaagaggcctctggctctggtgggagggatcgagggaggggctgccgcgggaaggagtgccgggagggagctgccactgacctgttctccccttttttgcccctggcagcaccaggccactacagttacccggaggtgcgccccccagccccgccccccaagtcccggccccggccagccccagccccgcggcccccacggcccccttggccctcgaggccagcagaggaaagggaggaggagtccccgcccaggccaagcctgtcccagcccccacggcggccttggggcaacctgacggccgagctgagccgtttccgcggcacggtgcaggacctggagcgccacctgcgggctcacggctacccactgcgggccaaccagacttacacgtcggtggcgcgccacatccatgaatacttgcagcggcgtctgttggccgccgccccagccggctcccccgcacccccgccccgccacccccgccccaccgccagccctgatcccggcaccaggaaacgggactccaaccagggaatctacggcctctcgcctgaaggcgtcgaccgggtggctgcgtcccgccaccccaagccagaggtgctgggcagttccgccgatggcgcgcttctcgtgtctctcgacgggctccgcggccagttcgagcgcgtggtgctgcgctggcggcctcagccgcctgcagagggccccggcggtgagctgactgtgccgggcaccacgcgcaccgtcagcctgcccgacctcaggcccggcaccacctaccacgtggaggtccacggggtgcgggcggggcagacctccaagtcctacgccttcatcaccaccacaggtagtgtgggctggggccacgggacacctatcccttgtccagcctcacctgccgttggagcctgcattcatgaattcctcccactgccaccccccactgcccccttctaccttcaggccctacctggccggggctccagggggcccccaggacaaagcacgagtccattgtccctagaagacgtccccaccccagggtcctggcatccatcctgtggatgcctaaggtcaaggcagcgccttctttggggtttcccgggacacttccaggattgttattttaggcaatagagggtgatgtggttggggcacctgcaaagattcactggagcagtttgagtgggctgggaattgaaaacagtgattcccgttctgactcactgtggtgagagtggctgaagactgtggttagtggttactgttttccacaatttggccttgaccttgaagggacacatcagaactgcgtgggggtggcctgggtgccatcaggcagcaactgtatattggggaggtgaaaccactgcttcttaagctggcttttcagaccccctggctcactttatgctggtctctcccacaggaacgatgtctgggcttggggaaagggcaccctgtggctgctgtggggagggtggtggacctcttcttcccccatagggcccagatgccacctgacctggatgtccacccccacaccctctctctcttcccactgcccactctcctcttgcatcctccctctctaacaccactgtctttcttccaggcttctcactgcagcactaatggaagccacctgaccaccacccagtgggggggatgtatgtggggagggacatggaagtctccgggggctggaggtcatggaagccttgtggggtgaaggatagcaggctttattttacctattacctgcctgaagcacaggcccgtctgctcaggaatgtggtagatgggggtgtttggaggattggctgacctttgggaggagggagtggcccaggtgagggaaccagaagtagaagtagaacaaggctcttagaggctggagggcagaacctggggactggggattcctttctagttctcatactggactctcctctttttctcaccctgccccttcccagggtcctcacccttgggcctcttggggactaccgatgagcctcctccctcaggcccctcgacgacgcaaggggcccaggctcctctcctgcagcagcgcccccaggagctgggagagttgagggtgctgggcagagatgagacagggcgcctccgtgtggtctggaccgcccagcctgacacctttgcctacttccaactgcgcatgcgggtgcccgaggggccgggggcacatgaggaagtgctgccaggggacgtccgccaggctctggtgcctccaccccctcctggaaccccgtatgagctgtcacttcatggggtccctcctgggggcaagccctctgaccccatcatctaccaaggcattatgggtacatcttggactctgctcagatcaatatcctgagattgggggaggagctggggttattgggacttcagaggtaggatggatattgaggggccagtgaagggcagggctgatgtttggggctggatagaggagaaaaggagagaaaaggaattgcaggttcagcaggaagatggatcgagggggatcttaaaacaatgataaggatgggtggggagaggggaaagaggcagaggtaaaaaggccgagggtgggacagagattccaggagagaggctgaaggtccctggccctccacctgcagctttccttgccctgtcccctgcccccactcttcggttgctcctctgcccttccctgccctataaatctttcagggtgggcatgggaaggcctctggacactgaccctcagcccccaatacctcgtccctgggagcctggtttgcagtggacagcagtccatggtcccatcagccagtttctgctgggggtgaaggctccttggggcagggggctccacagccatcaggacttcagacatggatgaggtttgcaggaccagtgaaagacaggtcctggggtacctggctttcacatcccctctttgttcctctctgtgggaccagggtggctgactcatcccccagctccaggtcaagctcaccactggaagagagggtggtaagagagacagcagctcaggtgggcagaggagctttcagactgctctgatgctgcagcagggaggcttgaaactctcattcagaaccagggggacctgaaacccccgcaaagatcctggtgtgcagagagaccaagaccttgtgagggatggagaaactgtcacaagggaagaagcagagattgagagggaaatgcccctcttccagaagagctagtcactgaggggtgggcagatagagtcttccggggagggatctatccaggatggagtgaggtgggcaggggagagggaaggagacacagacaagagaacggttgagtccactatgctttgcttttgcctctcaaactccagacaaggatgaggagaagcctgggaagtcctcaggcccaccacgcctgggtgagctgacggtgacagacaggacctccgactccttgctcctgcgctggacggtccccgagggcgagtttgactccttcgtgatccagtacaaagacagggacgggcagccccaggtggtgcccgtggaaggaccccagcgctcggccgtcatcacctccctggatcctggccgcaagtacaaatttgtcctgtatgggtttgttggcaagaagaggcatggtccgctggtggctgaagccaagatctgtgagtgacagcagtaacaccctgccctctgtactgccctgaagaggttttctcagtgctttgggaacctgctttgggagctccgggaaggcttcctggaggcagtggtgcatgagctgaattctgaagggaaagtagtggtggggcaggcaaagagtttgagaagctcagtgcagcctgagggagtcacggtgagtaaggtggggagagcatggccagtaagagaatcactgttacagtttcctctggctggagaacagggcatgtggggggtgccaaagggcctggtctcagggcttcctgtgctgtgctgaggggcttgggcctcattcgaaggcccctagagggcctctgaagggtaaagtgggagagtgatgagactagatatttatcttgcaaataaccgggtggctgctgagactagctggagaagtgagttaagagctggtaaaggctagcagggttgatcctgcctataatcccagcaccttgggaggccaaggcaggaggatcgcttgaggctaggagtttgagaccaacctggcaacatagtgagaccccccatctctactataacaaaagatattagccaggcgtggtggtgcgtgcctgtagtcccagctacttgagaggcttgaggtgggaggatcgcttgagcccaggagaccgaggctgcagagagccatgattgtgccactgtactccagcctgggtgctatccacactctgcacagagcaacaccctgtctcaaaaaaaagaaaaatgatgatgggtcagctgggatggtggcagtggggctggatgggggaggcgaaggaaagcaaggtgtaccaggcagcccccagggttctggatgagacagtcccattccctgaggcagggagcagcagaggtggggaacaacgccttagataaacttagatcaatatctaagagacacttacataaataccttttgtgcatttattgagagtcagttgtgatcaagatgttctctaagtggatcatcacaccccataaagcacacctgggaggcatgcctactttataggtcaggagaattgaggcaccagagtagtcgtgtggggttggggaagagacagggccactggaaccctgtcgacagcctacactcacagcggaggcagaggaagaagagcccacagggtagcttgcggagtgacttgcagggaggggcagaaccagggagggtgctgtctggactccaggaaggagggtgcggttggacttgtcagattccggaacagtgattcaagggctacggagcgtccacagaatttagcaatggcaaggccacccctggcctgcatgagagctgctgcctggtggaggggtggagctggatcgggagggtggtggaggtgaggacatggctgcaatcagtgtagacatcactttctggaatctgggctgggaatgagagcaaagagggaagatggaggctagagagagatgcacacagagtgggggtgaggaggggtgtgacagtagcttgttgaaatgctgatggcacagctgctggggagtgaagggtcagtgctgcaggcgagggagtccatccatgggtcaaagttcccaaagaggaggagaggcctgcagcatagatgagggaggctgtcccacattaaaacgcttcaaggattgtgctctcctctcttggagaagaagccagctagtagttaggcttggaagcagtggaggttgtactgggaagatttccctggctatggagatgtgaaagggcctggctgggctcccctctttctgaagctccctgctgctctggtttgtggttggaggcagagccacactagtccacgcagtgcttccatgccgtttgaaagaaggcacccattccttaaagtggacaccactcctcaccagggcacacagctcggcaagcagagtgctggctggatttcagtccctctgtactccctcagcaaatgcacttttgtgcagtgaacaacctgcacagcctcacacagcattcctatgtgggatttggcttccccattctccttggacctaagtctctcccttctctctacccactcttcctagtgcctcagagtgacccaagtccagggactccaccccacctgggaaacctgtgggtgacagaccctaccccagattcactgcacctctcctggactgtccctgagggccagtttgacaccttcatggtccagtacagggacagggatggacggccccaggtggtacctgtggaagggcccgagcgttcatttgttgtctcctcactggaccctgaccacaagtacagattcactctgtttggaattgcgaacaagaagcggtatggccccctcacggccgatggcaccactggtgagtagcagccacctcagcccccatgtgaccccttctcagccccatgcacacttcccttcagcccaaaaccagctggggtcccccagcaagacagctgactccagcttcccggccccactccagggctgaggggcagccagactcccccgcactgctgggccccttccatcccaagcagcagctccccgtggcccagaaggtgtgtcataccctggctgtgtcaggcttcccagaagtttagcactcgaattaatggactagtgaccccccaccccccataggtgtgacatcccgtcgaaaccccaagccccagtcccaggctgccagttcagcacctggctggatctccttgtttacagctccagagaggaaagaggagcccccccgccctgagttcctggagcagcccctcctgggggaactgacagtgaccggcgtgaccccagactccttgcgtctctcatggacagtggcccagggccccttcgactcattcatggtccagtacaaggatgcacaggggcagccccaggcagtgcctgttgcgggggatgagaatgaggttactgtccccggcctggatcccgaccggaagtataagatgaacctctacgggcttcgtggcaggcagcgtgtggggcccgagtctgtggtggccaagactggtgagtcatggctgccaggcctccctcccctgctagccccatcctgtgagcgggacttggctggggctccttccagcctccctccatcttcgccttctcagctcattttgccaaagcctccacccacttcctcccgcactgctctcctgtcctctgcatgccaggtccccctcatccagcctccacctcctcatctcttcctcagcctcacttcttcatctccaagggcaggtcctattttcccccattccaaacacctggactcatccttccacctggggctgtcctccccacagatgtcctcaccattcggtcactgtgttctcacccctcagtttttactgggctccttcatggtctggtttgggccatggtcacttctgggcttctgtcacctgctgcccacaacctcctgccatttctgctgtgttcagaggtggcagatccaagtgacaagagcaccacgtttctctagcctttttgcagcatgaagaggactcctctcagctcccgactccttgactcccagcccccttggaacagggcaaagggattgtgttcagcccagcatcccagcctgttcctccatgtccccagcctttccctgtccagtgccattcccctggcctgtgaattatttgatgagagatagtgtggatagtggttaggagcaaagactccggagccaactgcccgagtctcactaccagccttgcaacttacttcctgtaggaccttgtgcaaattgcttaacctctctgtgcctcagctttcccttctgtcaggtggctggatttcagtccctctgcacagagctgttggaattacatgagttaatatatgtataacacttagaaaggccaggcacagtggctcatgcctgtaatcccagcattttgggaggccaaggcgggtggatcacgaggtcaggagatcgagaccatcctggctaacacggtgaaaccgtgtctccactaaaaatacaaaaaattagccaggcatggtggcaggtgcctgtagtcccagctactcaagaggatgaggcaggagaatggcgtgaacccgggaggcggagcttgcagtgagccgagatcgcgccactgcattccagcctgggcgacagagtgagactccatctcaaaaaaaaaacaaaaacaaaaacaaaaaaagcccacacacttagaatagtgcttggagcagcaaagcattttcagagtgagctgcaatttctccctgactctctcacttcccagtaatcttttttgctccccacctccctcccttcctctgggttgtcattcttgccaattctttcctcaatctgctatcccaaagtagtcccccatgtagcaggtcacagaagggctggtttcccttgtgccacagtctccccactccatggagcctcagcagagacctaactgtagggggcgggtaggtgcccacagggctgtgattccagagccagccagggaaggacatgtctctccttggatcccactcaccccagaatttttctcccactcatgcctggagccctgccttagcaattcattccttggggttaaaggggagggaggggcagggctgcctggggaggccacagcaagagcacattccatggtcagatcctcatatgaggggtggggcagccagagtgccctggggagggcacaggtaggaagaggcctcactgccctcctcactgtctgaggtcagcactgtcagtgaacgtggtttggaagaaccctcagaggcttcctctcttcccatctcagctcctttctcagacacgaagggagacccctcacccccacagaacccaccagagcaggatggggcaagggctgtctcagccttctccatccgtgagtgaccgaatggcaaatacaaaggctacagagcccctgagcccacagcgtaagggcatttccatggctgtcatctgtgggcagcagcagcaaagccagcagccctttatgcctctatctcttctctcagctcctcaggaggatgtggacgagacccccagccccacagaactgggcacggaggccccggagtcccccgaggagccgctcctgggggagctgacagtgacaggatcctcccctgattcgctgagcctcttctggaccgtcccccagggcagcttcgactctttcaccgtgcagtacaaggacagggatgggcggccccgggcggtgcgtgttgggggcaaggagagtgaggtcaccgtgggaggcctagagcccgggcacaagtacaagatgcacctgtacggcctccacgaggggcagcgcgtgggcccggtgtccgccgtgggcgtgacaggtgagtgaggggcaggggcctgctttggttccctcccactgctggctcccagcttccctgtagccagttgctctccttgctccagtggaaccttgaggctgcctgccaggggaagacctagaaagagcatgtcactggggactggcgtaccaccagctttcatggccctgagcaagttttaaactttctgcacctctgtttccttgtccgtaaaatggggacacctacctcacagagttattgtgagggttaagtgagttaacagatgtaaagcatcaagaatgggcctggcaaaagtaaatatgctgccagtgtctgctgtgagaattgttataaatattcttactctgaggtctgctttgtcccctttggctggttcagttacttggtcagaatgcacatgaatctaaggccataccaccctgaaggtgtcctatcatctcctctgatctcagaagctaagcagggtcaggtctggttagtacttggatgggagaatgcgcgtgagacattggcctcttcatcagtacagcttgaagcaagctttcttttctttcttgtctttttttttttttttttttttttgagacagagtctcactctgttgcccagcctggagtgcagtggtgcgatctcagctcactgcaacctctgcctcccaagttcaagtgattctcctgcctcagcctcccaaatagctgggactacagatgcgtgccaccacacctggttacttttttgtatttttagtagagacggggttcaccgtgttggccaggctggtctcaaactccagatcctcaagtgagccacctgcctcggcctcccaaagttctggtattacaggcgtgagccaccacgcctgaccacaaagctttctctttcttctttctctctttttctttctttctttctttctttctttctttctttctttctttctttctttctttctttctttctttctttctctttctttctgtctctctctctctctttctttctttttttcctttctttctgttttttgagctctgttgcccaggctggaatgcagtggtgcaatcttggctcactgcaacctttgcctcccaggttcaagtgattctcctgcctcagcctcccgagtagctgggattacaggcatgcaccaccacacctggctaatttttgtatttttaatagagatggggttttaccatgtcagccaggctggtctcaaactcttgacctcaagtgatccacccgccttggccttccaaagtgctgggattataggcataagccaccacgcccggccacaaggctttctttaatactcatccagtgagtgactttacagcaaagaagaacatcccttccaccctttctctcaggcctggttacagggccacatccaccaccacacaggaccagcctgggcacctcctctccagggcctcagcccaagaggctgagtggacagcagtgcctctgggaccctcgggctgacctgcccggtttagtcacagtgaggggaatctcttttttcctttgctcacagaaacaaagacacacctttctcaaaaataacttttactataaggggaaagatttaaaaattaaaagtagagaaatagatagttttccagaacatggtttctgtaattccaccaagctcagcctcatcatgacttggttgatttcatttccagaaccttccaccctcaatttattttctttgcctcagtcagccctgagaagagggagacggcaaagccaccctgagtggctgtccttggggcctgaggttgtagggtggaggctggtgccaggcccagacatgctgccaagtctgctcctggagtgaccctccctctgccgctctgtcccagggacccacactgggctctgtgaggccctgtgcctggtccctggggtaaggatgggctctgtcaggcactgaccaagtcggtgcagtagagataaatggagtttgggaatctgacaaactgagttccttcctgtcttcctctgttctcagctgtatgatttttatttttttattttattattatttttttgagacagagtcttgctttgtcacccaggctggagtgcagtggcatgatctcagctcactgcaacctctggctcccaggttcaagcagtcctcctgcctcagccccccaagtagctgggattacaggcgcccaccaccacacccggctaatttttgtatttttagtagagacagggtttcaccatgttagccaggctggtctcgaacttctgacctcagatgatccacccgccttggcctcccaaagtgctgggattacaggcgtgaggcaccgtgcccagccagctgtatgatcttgaaaaacttacctcctctcctggaacctcagcttcctcatattcaggagggagtaaacgctgcccagcttgttgtcacggttaaaggtggtgatgtaacatgtctggcatcttctcagctcattcatcttttgctcagaccttcccgtgagggaatccctgtatatccatgttctaatgctggatattttgaaacatgtattttacacgtcctggataaaatagatgaggccctttaggaaagaaatgggcatcagtgcgcattatcagagcagcaaaaggacgaagcagctggagtccgccaagctgggggctgtgtctggcagcacacacagtgcagttgccagggggagaggtgcgtggagctcattagacacacttctaaattggaaaaggactgtcccacatgcagcatggggactgccagagtcatgaatcgttataattgtacctttccagttaatccaaaccaccagcaataaagcttgatggtgaaggacattttcattccctcatggaaagaagtgcagagagggcaaaaaggagcagggaatgggtgctgcaggaacaagtaaggttagaaggcaaatgaaatgagagaaaatgcccagcctggtacctgtacatagtagatgttcaatacttggtggtcactctgctccctcccaccacctcagctgcctccatgcctgccctccccagcctgactcatttctgtctgcccgaggcctggtcaccagcctgttttaagcagttgtcacttgcttggagccttgtcttgccctccggaggaagccagagaaacaagttcttgggagccccacccatccagccaccttctctgccattttgcctcttgggaccaccttctagtttgctcactaatgagtgcttcctcatgcgggagtggtggggatctgcaggtcctgagcccagacctgtagaccactcattattttacagacatctgtggagcacctactgtgtgccagggactgggacacagcagtgaataaagcagagctcctgcctgaggagctcacattctagtggagagggacaggcaacaaattgcacaaatatgtcagtggcaccggatgtgacagtgatgagtggtggggaaaagcagagcctagtagggagacagcaagggcctcactgcgagggcagtgtctgaggaaagccctgaaggaggtgagaggacagccacctaggcctttggggaaagagcatcccagacagaaggaagagcaaatgcagagactggcaggcgagaagcagccccagatgtctgcagacagtgagggatgcagtatgttttgtggtggagttggaggagggcaggcaatagggaatgatctaagagatgaatatgggacctcagaggccagtgcaggacttggatttcaccctgagtgaggtagaagccactgcgggaaccagctctggctaatgtgttaacaggatccttctggctgcagacccaacagactaaaggggggtgagggcagaaggcgatgacctgagagaatgttgtgataatccaggaggagccagtggtgcttggaggtggcaaggaggggtcagactctgaaggtagtgacaacaggcggatacccacagggcggatgtggagtttaagagaggactcggggatgactctggcggtttagatctgagcagctggaagaatgaagttgtaatcctggtcaggcgtggaggatcatgcctgtaatcccagcacttggggaggccgaggcgggcggatcacctgaggtcgggagttcaagaccaacctgactaacgtggagaaaccccatctctactgaaaatacaaaattagccggacgtggtggcacatgcctgtaatcccagctactcaggaggctaaggcaggagaatcgcttgaacccaggaggcgtaggttgcggtgagccgagagggcgccatcgcacaccagcctgagcaacaacagcgaaactccgtctcaaaaaaaaaaagttgtaatcttactgaggtggggaggctgtggcgggagcaggtgtcaggaagctcagaggctcagttttggacttgttgagtttgacacacaagtaggcctccaaggaagacgttgcacgaacactagtctggggttcaggggaggtctggacagagggtgtaaatctggagtcattggcatatagatggaatttcagcgctctcccagggtgtcagtgatggttgatactcttctcccccaacaaatgcagcctcagacaccgagcagggacctagtgaaggactgttgaccagacagatgttcagatcaatgcgcttttacatcaaaaccatcatgcgggttccacaaatgcaacagacatcgctgggtgtggtggctcacacctgtaatcccagcactttgggggctgaggcaggtggatcacctgaggtcaggggtttgagaccagcctggccaacatggcaaatgccgtctccactaaaaatacacacacacacaaaattaggcaggcatggtggcgcacgcctgtagtcccagctacttgggaggctaaggcaggaggatcgcttgaacccgggaggcagaggctgcagtgagccgaggtcgcccactgctctgggtgacagcgagactccatctcaaaaataaaaaataaaaaataaataactagacatcattactataagaaaagggggattctttactaacagccccctaccatctctgtcccagccccacaacaagaagagacccctccagccactgagtccccgctggagccacgcctaggagagctgacagtgacagatgtgacccccaactctgtgggcctctcctggacagtccccgagggccagtttgactccttcatagtccagtacaaggacaaggacgggcagccccaggtggtgccggtggcggcagaccagcgagaggtcacagtctacaacctggagcctgagagaaaatataagatgaacatgtatggactacatgatgggcaacgcatgggccccctgtctgtggtcatcgtgacgggtgagtaatggggggactcagtcctcatctctggttacccagagctcccccaccccatggcccttcttccagccctgccttggtaccaccgcaccctcactgaggggctagatcccctcaggccctggctcggtgaccctgccagtctttctgttccctgacccctttactcctcccagggctagagccttctcagccctccagctccttccccatctccactctgccccccgcccaggggaatgtcttatttccatttggcctaaatccagccacagactttctctccccctctccgactgcccacagctgtttccaccccttctctttacaaccctgctgtgacttggacacagctgccacctcctgcttctgcccttttttgttgaggcgaagtgctttacatcctgagtcccttctcaggagtcctctgccacctgcctgcactgcattccatcccagccctggagagttttcatctctccaggaggctgcctcactcttgctctgggctccttcctgcccctcatggcttcctgggcacaggttctccatgattgttgtgctgtggcatctggtgaaacccctaccccacctgaaggcaatgtttttaaatctgtaaaataagctgtataggattacaaaggaaacattatatttatagacagttatcaaaatatttcttttttatttttgagatggagttttgctcttgtcatccaggctggagtgcaatggcgcgatctcggctcactgcaacctccgcttcccaagttcaagcaattctcctgcctcagcctcccgagtaactgggattacgggcacgtgccaccacacccagctaattttttgtatttttagtagaaacagggtttcgccatgttggccaggctggcctcaaactcctgacctcaggtgatccacccgcctcggcctggcatgagccactgcacccggcccaaaatatttcttaaaaatccaaagttacgatttagtaatacttggacttatttactagttcattaaataacaggacttggtggcgcgtttactaaactacaaaatttagaagcagtgatggatataaaaggtattttaaagtttctgcaataactctaaggtgacatgaaaacatctgtggtttctattggtaacaaagtcacaataattctactctggtgggttttctatattagttttggaaagaaatgctgcatttcagttagaggtctggaagtaaaggtgtaactattccccatctcagttcacagcccccctgaggccctcaaagcccaggggttctcccctcagagatctcaaccatgttctttgtcttcccaaatcccagctcccctcccaccagccccagccacagaggcctccaagcctcccctggagccacgcctaggggagctgacagtgacggatataacccctgactctgtgggcctctcatggacagtccctgagggtgaattcgactcctttgtggttcagtacaaggacagggacgggcagccccaggtggtgcccgtggctgcagatcagcgggaggtcactatccctgacctggaaccctcccgcaagtacaagttcctgctctttgggatccaggatgggaaacgacgcagcccagtctctgtggaggcaaagacgggtgagatgggcccctacacagctgagcctgaggccacagccttcccacccttctcttcactccctctgctgagtcttccctttgtccacctgctctgtctcatttgaaaagccacatggggctagcacagtgactcatgcctgtaatcccagcactttgggagtccaaggcaggtcaggagtttgagaccagtctggccaacatggcaaaaccctgtctctactaaaaagacaaaaattagctgggtgtggtgatgggtgctagtaattccagctactcgggagtctgaggcacaagaatcacttgaacccaggaggtggaggctgcagggagctgagattgcgccactgcactccagcctgggtgatagagccagactccgtctcaaaaaagaccaaaaaaaaaaaaaaagaaagaaaagccgcaaagcagatgaggaccaggagagtggggccagttcctgggtctgctgtcccctgctgactctgcctctcttctcgtaatttccacttttgttggatgagggaagcccctacaggcctcttcctgcagggtggatgtgggagcctgggggtgctgggagaaggggcgaggggagccaggaacccttcctgccttgcgaatccatcacctcctgagagtctttgttgtctcccctgtgactctcacccaggttctcaccctcctagctcaggcctgtctgggcccatatgtgcctcctacagaggctgcccttccttctctgccctcctcctgaagtctcagaaattgggaaccagaggagcccagcccagctgtgcccctttccgagggttcagtccaagccctcccctgcccctgggggctccctattgccagaaaacttgcaataacaatgtcgtcagcgtcctcaccgtccaggaaggcagcaggccagctccttctcaagccctgggatggctcctcaggcagacaccagatcccttccctgcctgagctccccggcatcatccccctcaacattctcacaggcagcccacgctccttcaccaggcccagtgggagccttagttctcccgggccagccggtgcagaataagaaagggaacggagaagggtgagaactacctgtgtcgtaacatcctgcctccctgacctgccgagtgcccccatcagggatcctgcgctcctcggggccggccaaatcacccctttcctcaggggccggccaaatcacggccaaatcgtgtgctcctgggtaagaggagatagagacccagtctgtaagaagctgcaccctgctggggaagcagtctgtgagaggcggaaagaggctggacagaaaggggagtaagatgaggcagggagctagggaatctcttttcctggaggtgactcaggacaggtgaccctccccacttgggtcaaggggagagaggcatggaccagacggagatggtggtgaggatgggaggtgatggaaatattttggggaagcactgagcatttgggcagttctgggtttttccagccccagagggaggcagtcaaggagtcgttttggaaaaaataaacacaagaacctttcctctccagttgcccgaggtgacgccagcccaggggccccaccccgccttggggagctgtgggtgacagaccccaccccagactcactgcgcctctcctggacggttcctgagggccagttcgactcttttgtggtccagttcaaggacaaagacgggccccaggtggtgcccgtggagggccatgagcgctctgtcactgtcacccctctggatgccggccgcaagtacagattcctcctctatggcctcctgggcaagaagcgccatggccctctcactgccgacggcaccacgggtgaggggcattccctgcaggtccctgctctgctcccctcaggccaagcagcagacggtcacttgtggtggctgccattaccattatttggccccagccactcggctcagatccagctccccacgtccctgcacaagcccctagcacagcccggcaggactcagccacgcaaagccctgtctccagacctctcaatcctgcccgtcgaggtcacccagtcttccagaaacagctcagccgtttcctctccgtgtctccatctcagaagcccggagtgctatggatgatactggaacaaagcgtcccccaaaaccccgtctgggggaggagctgcaggtgaccaccgtgacccagaactccgtgggcctctcctggacagtccctgagggccagtttgactcctttgtggtccagtacaaagacagggacgggcagccccaggtggtgcccgtggagggcagcctcagggaggtcagcgtgccgggcctggaccctgcccacaggtacaagctgctgctctacgggctgcaccacggcaagcgtgtgggccccatctcggccgtcgccattactggtgagtgtgcggcagctggaacacctgtgcctccttcccgcctggctctcctggtctgactgagccataagatctctgagcttcccattttatatcatttccattgatccagaaagtttccttgtgcccctttagagtcagttgccccagtcccagcctccagcaaccactgtctgctttcgatcatcctggagacagcattttgactctccatgtaatggaatcacaatacgcagtctcttgtgtttcatttcttgcaattagcacaatgcttttgaaattcacccatgtgcagcaaaagctggtctttcgattgctgactgcttgccctcactccctctcctccctcactcctcctgagagtctgggtgcagcgacacaccagccatctgtctctacctgtctctgtgaaccagccggcagggaagaaacggaaactgagaccacggccccgacccctccagcgcctgagccccacctcggggagttgacagtggaggaggccacgtcacacaccctgcatctctcctggatggtgactgagggagaatttgactccttcgaaatccagtacacagatagagacgggcaactccaaatggtccgcataggaggtgaccggaatgacatcaccctctctggcctggaatccgaccacagatacctggtgaccctgtatggtttcagtgatgggaagcatgtaggtcctgtccatgtcgaggccctgacaggtgagaactctgcccactatgcctcctttcagatggctgggagagtccagaggacagcagagtcccgcggataccctgcccacctcagtcctctctttccatgtctctgtccagtcccggaggaggagaagccttcagaacctcccaccgcaacccccgagccccccatcaagcctcgcctgggggagctgaccgtgacagatgccacccctgactccctcagcctgtcctggacagttcccgagggacagtttgaccacttcctggtccagtacaggaatggagatgggcagcccaaggcagtgagggtgccagggcacgaggaaggggtcaccatctcgggcctggagccagaccataaatacaagatgaacctgtacggcttccacggtggccagcgcatgggccctgtgtctgtcgtcggggtgacaggtgagtggatgatgggagccccagggtgggagccatgggagggtcaccctcttgctctttggtgatgactggtggggaatgggacaagggtctggtcagcaccacagacctgcttgtggctggggctggggctccccttgggccttcctgtgaggttgaccactggctcctcctgaacagagaggggccatcgggaattttgctgtgctggtggctgtcccaggtcccccacagctgaccctggaacttgtcatgtgtgttagctgtcagctgagcaggaccacccagccccaagagtaggcctctctgaactgacctcgggtcccccagtcatagccttggcttctccctccttttccccagtacccaaggacatccccctcactctctcttcctccttctcagctgcagaggaagagacccccagccccacagaacccagcatggaggccccggagcccgctgaggagccgctcctgggggagctaacagtgacaggatcctcccctgactcgctgagcctctcctggaccgtcccccagggccgcttcgactccttcaccgtgcagtacaaggacagggacgggcggccccaggtggtgcgtgttgggggcgaggagagtgaagtcaccgtggggggcctggagcctgggcgcaagtacaagatgcacctgtacggcctccacgaggggcggcgcgtgggcccagtgtctgctgtgggcgtcacgggtgagtgtgcactgcagagccctctgggttgggtcttagcaaagtacagcctccagcatctcctccactagggacccagaaccccaagacctcaaacctgtaatacaccctgttcactaaaggctcaggacaggtgtgatctggggacagagagagcaaatccaggagaagtgtcggagccatatgggaaaggcccccagggactgaggcctcttgggaggtgattcactggctggtttgtggctctccgcttttccttggaactctatacataactctttttgtgagattggaacacatttttgaaatacaaattaattaaattaataagtatttgttaaataaaatttcaaatgtataaacagaaagaatagtacaaagaccctgccatcctccttcaatcaaatatcgacttctggccagtctggctcatctctgccccacccacttcctccactagaatcactagaatgttttctttctttctttctttctttctttctttctttctttctttctttctttctttctttctttcttccttccttcctttctttctttctctttctttctttctttcattcttttctttctttctttttagacaaggtctcactctgtcgcctgggctagagtgtactggcacagtcacaattcactgcactgcagcctcaacctcctgggcttaagggatcctcccacttcagcctcccgaatagctgggactacaagtgcactccaccatgcccagctaattttttgtattttttgtagagacagggtttagccatgttgcccaggccagtctcgaactcctgggctcaagttatcctcccacctcagccaaagtgataggattccaggcgtgagccgccacacccggcctgaatgttttctttattaacacctttatggagatataattcatgtggcataaaatacacttgtttttagtgtacaacttactgattttagtatctttacctacttgtgcagccatcaccacgatctaattttagaacttttccatcacccccaaaagaaatcttgggtccagacccattcctacctcagccctagtttataactaatctacttttttctctgtagattgctgttccagaacatttcgtataaatggactcaaacaatatgtattcttttgtgtctagcttctttcactgagcataatgtttttgaggttcatcaatgtagcatgtagaagtactatacttactacattgctattgattgattgattgattgattgattgattttttttgagacaaattcccactctattgcccaggctatagtgcagtggcatgatcatagctcactgcagccccagactcctgggctcaagccatcctcccatctcagccccccaggtagctggggccacaggtgctcgccaccacactcagctaatttaaaaaaattttttgtagagatggggtctcacagtgttacccaggctgatatcaaactcctggcttcaaggaatcctcctgcctgggccttacaaagtgctgggatagcaggcatgagccacctgctctctctcagccactacactgctttttattgccaaacagtattgcattgtgtggttatactactgcagtattttaaaaacgaaccacagacatcctatgctttcatcactaaatatttaaaggtatatctctttttaaaaaaattatttttaaaaaatccacaatatggccaggtgaggtggttcacgcttgtaatcccagcactttgggaggccaaggcaggtggatcacttgaggtaaagagttcaagaccagcctgaccaacatggtgaaaccccgtctctactaaaaataataataataataataaattttaaaaagtacaaaaaagcggagcgtggtggcacgtgcctgtagtcccagctacttggcgggggttgaggcacaagaaattgcttgcacccaggaggtggaggttgcagtgagccaagatcgcgccactgcactccagcctgggtgacagagtgagactctgtgtcaaaaaataaataaataaataataaaattccacaatacaattagcataccttgataagtgaacaatcatgccttgatatcaagtatccaggtagtgctacagtctcccgagtgtctcataattgttgtttcccaatttgttgctgaaatcaggtctatagaaggaggatacattgcaattgagaaaactgaaattttaaatagagtaatcagggaaggcccacagaagaaggtggcttttgaacaaagacttaaaggaagtgtggggatgagccatgaagatatctggggaaagaacatttaggtagagggaacagtcattgtaaaagtactgaggtaggaggctgcctggcatggttgagggaccataaggaagccacaaaatctgattatgattataatcagaaatcgatcttaagttagggccagactgggcccaccttctgacctgaattcaagacagctggggcctcaacacctccttgcagcaagagaaaagattctgtttctatctcttcctagcccccgaagaggagtcccctgatgctcctcttgcaaagctgcgcctagggcagatgacagtgagagacatcacctccgactccctcagcctctcctggacagtccccgagggccagtttgaccatttcttggtccagtttaagaatggggacgggcagcccaaggcggtgcgggtgccgggacacgaggatggggtcaccatctcgggcctggagccagaccacaagtacaagatgaacctgtacggcttccacggtggccagcgcgtgggccccgtgtctgctgttggtttaactggtgagtgtgcagtagggcactgggccctgccctgaactagactcagtttcccttttattgtcagtatctggtggctttattttactttccctgagaccaagcctcccaagctcctgggaatggttctgctggtgccttcactccgagactttggtattgccccaggtcttctgcccgttacacatgggctttttgggttcccaaagaggtgggggaccaggaaaataacacagactgaggcacacctggggttgaccatagcttcagcccatttgagctgtgtgtcctcaagagactcacacaacctgtctgggcacggtggctcatgcctgtaatcccagcactttgggaggccgaagggggcagatcacttgaggtcaggagttcgagaccagcctggccaacatcatgaaacccccatctctactaaaaatacaaaaattagctgggtgtggtggcacatgcctgtagtcccagctactcgggaggctaaggcgggagaatcgcttgaacccaggaggcggaggttgcagtgagccgagatcgagccactgcactccagcctgtgtgacagagtgagaccctgtctcaaaaaaacaaaacaagcaaacaaaaaacagacacacgacctctctgtacatccttttcctcatctgtaaagaaggaataaccatacctgtcgtgaagggtgggcgggagtgtggcttggctctcacacacaatgagagataactgcagtctttcccttctgaggaaggtaggtagttcctgaaaaccgcttagggcaaattctcataattatcactgatttcagtgggaaaaattgtatgtgttctctaagctcccaaattaatacccatttatttttaaaacaacactgaatcctgttaacatggatactattactttaattgtaaatattggccatgtgcacaacttaataaggcattttcctttcattaccctgtaactcggctctttgatgcttttgtaagctcttttatagctgttaccccctagatgcttaagactcagttctcaaaaagaacagacaaatgaaatgtgatgaatttgtaataccactatcaaggcagaataaaaccctatgaagagcagaaaagattaaagaaatcaatgaaaacaaagcaattgatttcacacgggccaaaagaactggcatcactggaggtgctctctctgccgtaagttagcagagctactgcaggtccagagacaactcagctgcaaagatgccctcatgtggtctcatctctctaccctcagctataaaatctaagttggtttctaaaaatgctcaggattaggtggaatttccaagcccaggtggatgaacctcctgatacaacttgcctgttgtgtttggttggtgttctttgttttctttttttttttttctttatgttgagatggagtctcactctgtcacccaggctctcaggctggagtgccgtggtgcgatctcagctcattgcaacctctgcctcccaggtccaagcagttctcctgcctcagccttccgagtagctgggattacaggcatgcaccagcacatctggctaatttttgtatttttagtacagacaggatttcgccatgttggccaggctggtctcaagctcctgacctcaggtgatcctcccgcctcggcctcccaaagtgctgggattacaggcctgagccaccacgcctggccctgattgctgttttttgtttgtttgtttgtttttgtttgtttgtttttttcttgagaaggagtctcgctgtctcccaggatggagtgcagtggcgtgatcttggctcaccgcaagctccgcctcctgggttcatgccattctcctgcctcagcctcctgagtagctgggactacaggtgcccgccaacacgcctggctaattttttgtatttttagtaaagacggggtttcacagtgttagccaggatggtctcaatctcctgacctcatgatccgcccgcctcggcctcccaaagtgctgagattacaggcctgagccaccacacccggccctggttggtgttcttataaagcatcaattctgtcctgcaaaacaaatttgcttggcagctcctaagggtcccaggcctgcacactgagcatcacagggatgccacctgagcatcatgacttcaccacaggtgtggtgttaactgaacattcaaagcagaaaaatgatattctaagcttggggcaccagcatccagactgtgggcccttggtgtgtctaagagaatcccagagtcccttggttaaaaggaggcccaccaggcatgcccacccattctattttctgatgcagccccaggaaaggatgaagaaatggccccagcctcgacagaacctcccacccctgaaccccccatcaagcctcgcctggaggagctgaccgtgacagatgcgacccctgactccctcagcctgtcctggacggttcccgagggacagtttgaccacttcctggtccagtacaagaatggggatgggcagcccaaggcaacacgggtgccaggacatgaggacagggtcaccatctccggcctggagccagacaacaagtacaagatgaacctgtacggcttccacggtggccagcgtgtgggccccgtgtctgccatcggggtgacaggtgaatggacgatgggagccccagggtgggagccatgggagggtcaccctcttgctctttggtgatgactggtggggaatgggacgggtctggtcagcaccacagacctacttgtggctggggctggggctcccattgtacctttttgtgtggttgacccctggctccccctgagcagggaggggccattgggagttttgctgtgctggtggctgtgccaggtcccccacagctgaccctggaatttgtcatgtgtgttagctgtcagctgagcaggaccccaagaatgggcctctctgaactgacctcaggtcccctagtcatagccttggctatttcatatgtcccctagtcatagccttctccctccttttccccacgacgtaagcacatcccccagggaccctgccatcctctctgtgtccctttttctcagctgcagaggaagagacccccagccccacagaacccagcatggaggccccggagccccctgaggagccgctcctgggggagctaacagtgacaggatcctcccctgactcgctgagcctctcctggaccgtcccccagggccgcttcgactccttcaccgtgcagtacaaggacagggacgggcggccccaggtggtgcgtgttgggggcgaggagagcgaggtcaccgtggggggcctggagcctgggcgcaaatacaagatgcacctgtatggcctccacgaggggcggcgcgtgggcccggtgtccaccgtgggcgtgactggtgagtagtgcttggagtctcggggtaaccacctttccctcatgggtacctggtttactgctgtgccctttcaccaagccctgtgggtccagacttgtctcctgtgtcctgccctccctctgtgccctgtggctgtggcctatgctagcggtttgcttgttcactttggcgtggcctccctctaatggtcaaccactgataacctccaagagtgaaatatgtcaggcgcacaccaagcctgacttacgagaattttcctttctttccatcttaataacagcattctttgttataaccacatacacaaatgcacacaagaggaacaatccaacgtcaaaccacgttgggatgactaaataatttaggcaacatctataaaaagagctattatgccgccactgaaatgttttaacataagacccttactttataatgttacattgaaaaaagagagcctaggctgggcacagtggcttacgcctgtaatcccagcactttgggaggccgaggcgggctgatcgcctgaggtcaggagttccagaccagtctagccaacatggtgaaaccccatctctactaaaaatacaaaaattagccaagcatggtggcacatgcctgtaatcccagttacttgggaggtggaggcacgagaattgcttgaacccgggaggcagaggttgcagtgagccgagatcaccactgcactccagcctggcagatacagccaaactcagtctcaaaaaagaagaaaaaggagcccaaatttttgtaaggatgctaatcacaaccatttgaaagtaacaggcatggcaagaagactggaaagaaacacatcccacgggttgcctgatttgttagatagaatagaatattccagcacatttttttctgtattattctattctgcatagtccaaattttcttaaatggcaaacatttcttttacaatcagggaaagggaaaagagaaaatatataatgtcttctccttctttacactccatctgtcctactcctctatcgctcttgtggcttatttcatttatttccttcttttttttttttgagatgaagtttcgctcttgtcgcccaggctggagtgcaatggcatgatctcggctcactacaacctctgcctcctggattcaagcgattctcctgcctcagcctcccgagtagctgggattacaggcatgcgccaccacatctggctaattttgtatttttagtagagagggagtttctccatgttggtcaggctgctcaaactcctgacctcaggtgatctgcccgcctcggcctcccaaagtgctgggattacaggcatgagccaccgcgcccagccagacttatttcatttctaattatgaggaagttcaaaatttctagtccataagaaattggaggggtggagatcatgaggttaattgaattccaaatgctcagtcaggctgccttttctaagtcatcctcagccaggttgttatgcctggcttagagtatttttcgagaattcctaccgatggggaagaatcagccctgctgagaggcggtctcttgcagggcaggtcgccacctctgtggcaccaagtgaggtgcgagctcatctcccaaaggccatccagacagaggaagcactctcaatcggcatccccgattcctgggggagaggcctcatttccatatgcatgttcagaggaccatctgagtgttgggaaacagggggaatagggaaattattggaaaatgaacattagaaaaattcacattccgggggtaagctgtcctggtccacgttcagttttgtgttcctgtctccactgtggggaaccacagaactgacagaggacaggctgagggacccacccctgcccctcctgttctatgtgtattgctgccccacccccaccccacactctattattaattgttgtagcccagaatttctttctttctttttcttttttttttttttttttgagactgagtctcactctgttgcccaggctggagtgcagtggtgtgatctcagctcactgcaacctctgcctcccaggttcaagtgattgtcctgcctcagcctcctgagtagctgggattacaggtgcatgccaccacgcctggctaatttttgtattttcagtagagaccgggtttcatgatattggccaagctagactcgaattcccaacctcaggtgatccacccgcctcggcctcccaaaatgctaggattacaggcgtgaaccactgctcccagcccagaatttcttttttagcccacgtttttctagtgaaaataatacagcaacattatgtggaaagcttgaaaaacagaaaacaagaatctcatagtcctactttctcccccagctgccggcattaataacaatgtgtgtagtgcacattcccttcctgtattttgcatgcagagcgtgttttaaagttgcaatcagtgttcataaagttcttggcacttccttttttgtacacaagtacattgtaatcattcacctcacggctacacaaccagcattcatcatcgtttcaatggttatttgatgcgttgcggtgaaagcactataacaaaattaatcatcttctacgggtcatttgtgttcctgacacatctgctgtcatgaataaccccatcgtgagttcttccatgctataactttttcctgctttaataattttcttaggacagatgcccagaactgggattattgggtcaaaggaaatgagaattactttggctcctgacactatgtctcagttgccttctggaggtttctaacagtgcagctctgccagcagtacaggccgggggctcggggatacctcaccggctcttattccaagagtcactgaacggcgaacacaaagctgccccagccctcagcctgctctggaggggcgcatttgatgtatgacctctgttgacagcaccagcaaagcaagttgcccttaaacccttaaactctgtatccccctatattacctttcagccccacaagaggatgtggacgagacccccagccctacagaaccaggcacagaggccccagagccccccgaggagcctctcctgggggagctgacagtgacaggatcctcccctgactcgctgagcctttcctggaccgtcccccagggccgctttgactccttcaccgtgcagtacaaggacagggacgggcggccccaggcggtgcgtgttgggggccaggagagcaaggtcactgtgaggggcctggagcctgggcgcaagtacaagatgcacctgtacggcctccacgaggggcggcgcctgggcccggtgtctgccgtgggcgtcacaggtgagtgagtgtgggtggggcagggttggaagacagccctagaaaatgtgcccttctctaccattttcctatacatatttctgtcttgatggggctcacagtgaaaggaatatagcaacattatggaaagacatgtcatggagagacaggctgcaatccagcaaatgaagcaaaggcgggtgagcatgtgatagggaggcccagggctcaggtcaggaccagacagggacgcctaagtcaccctgcccatgggtacccaggggacagccaggacctgaggccaggcatgccttagcttggtgacagctttagagagaaggtgaagtgtgtcagataatcacagctggtgcaaaggccaggaggctagaaagagcatggcacgtgagaggcactgaggattgagtggggtgtcctttacggtgagtatctcatcctgaagtgtgggagcagaggaggggaccactcaccaggcctggggtctcccagggatgaggatgtggttgcccaggtctgtgctgagatggccccagcagctgtgcctgtgtgaagctcatccgtgggggctgaagatggggatggggtggcagggagcctggaggcagcgaggccagtaggcagttggtggccctggtgagaggtgacagtggctcaaactaggatcggggactggaggtggggtaggaaggtatccaggggaattcagggtaaagatgctctgaggctgctggcagctggtgaggagctggatccaggaacacaccccaggctctggcctcgggaggagtgtgctgagcttgttgcggagcaaagacagaagcccagtgaacaaaagatggcgaagagaccccagtgctgggaggccaggggtgcagaggccgagtggggctgtgctcaaaagagaggcggtgctggagggacagggagaggtggcctgggtgttgggaggtgggggtgaggtgggggctgagggcaggagggtcagggtgagggataggaaaggccacaggagaggagaggatgaagagctgtgctggaggggctgtgggcagcatcgtcctgctcttgggcactttgtgttttgtgacacatcctttctatgctgaactgaggagccagggacctcactgtccccacacgtgtctgtccaactccagaggatgaagccgagaccacccaagcagtgcctaccatgacccctgagccccccatcaagcctcgcctgggggagctgaccatgacagatgccacccctgactccctcagcctgtcctggacggttcccgagggccagtttgaccacttcctggtccagtacaggaatggggatgggcagcccaaggcggtgcgggtgccggggcacgaggacggggtcaccatctcaggcctggagccagaccataaatacaagatgaacctgtacggcttccacggtggccagcgcgtgggccccatctctgtcattggggtgacgggtgagtggatgatggcagccccagggtgggagccgtgggagggtcaccctcttgctctttggtgatgactggtggggaatgggccaggggtccggtcagcaccacagacctgcttgtggctggggctccccttgggccttcctctgaggctgacccctggctcctcctgagcagggaggggccatcaggagttctgctgtgctggtgactgtcccaggtcccccacagctgaccctggaacttgtcatgtgtgttagctgtcagttgagcaggaccacccagccccaagaatgggcttttctgaaatgacctcacatacccagtagtggccatggtttctccctccttcccttgaagacctgagcacatcccccaggcacctggcatcctctctatatctccttttctcagctgcagaggaagagacccccagccccacggaactcagcactgaggcccgggagccccctgaggagccgctcctgggggagctgacagtgacaggatcctcccctgactcgctgagcctctcctggaccatcccccagggccacttcgactccttcaccgtgcagtacaaggacagggacgggcggccccaggtgatgcgtgtcaggggcgaggagagcgaggtcaccgtggggggcctggagcccgggcgcaaatacaagatgcacctgtacggcctccacgaggggcggcgtgtgggcccggtgtccaccgtgggtgtgacaggtgagtgtttgtgagtgaggaagatggccctagaagatgttgctttctctgcaacttcatgaaaacaaaaatattctcaccagccgggcttcttttgcacgtttccatgcttggggatcttgctaagaggcagattggggttcaacaggtttgggctagggccagagattctgcatttccaacaagaaatgatgcggatgctgctggcccatgatcacgccccttgagtagcaaagttcttcacgacaaaggaattggaccctcttttgaaatctgttgaagagaatttttctgcgtccctgattcctggtagtgtgctttctctgtggagttgactaggggccgtgaaggaagacagaaggcagtgaggggcagcgcgtcgactgcacactctggaagcccactattggaataggaataggaacagacctttctcaccaatgggccaatttgttcattcagcaaagaattccttgccctgatccggacactgtaattttagggtatcaatgtcctctggccaacgacctccagaaactcacctaaaattgaatggatggaattatgctccatgcagtgcaggaggactgtggggtgacttaggaagaggctttagaaagagattgttaaggaactgggcttgtgtttggtgttttaggaaagcatttaaggaagcaaggttttgctctttattagacgctgtcaggaagaagggataaccctattaccgggcgtctcactaagtcttatctttggggaggtcaactagagcaaggccaaagctgccattggtaaagaagcagctatcactcagattagctggatgggtgatgtttggttatttttgtgctttggaaaatgttagagttcatccttactgagacatgatcacagactggccttgttcttgtcttgatccatcctactgacaaatggcctagtctgatgttgatgttccatgaaattgtctgttcaactggaccacgccaagaccagactgtgccaggccagccccaagcagccgtggcctggcagagggaaagggcagctcacgggtgtcagggctgcctttttctttcataggcggaagctggaaagtgacacacacaagttcatgttttcatggggctcacaattgtgggcacaagcagaaaaccggaaagtaagcaaagaaggatgagcatgtggagcccaggagccaagccaggattgggaagggacagtgaagtcactctgcccacaagtacccaggggacagccaggacctgaggccaggcaggccttagcttgatgacagctttggagaggaagtgaagcatgtcaaatcatcacagctagtgcaaaggccaggaggctagaaagagcatggtgtgtgagagacactgaggattgagtggggtgtcctttgcagttggtggatcatcctgaagtgtgggagcagaggaggggaccactcaccaggcctggggtctcccagggatgaggatgtggttgcccaggtctgtgctgagatggccccagcagctgtgcctgtgtgaagttcatccgtgggagctaaagatggggatggggtggcagggagcctggaggcagggaggccagtaggcagttggtggccctggtgagaggtgacagtggctcaaactaggattggggactggaggtgggggaggaaggtatccagggaaactcgggggagaggtactctgaggctgctggcagctggtgaggggctgggtccaggaacacaccccaagctctggcctcgggaggagtgtgctgagcttgttgcggagcaaagacagaagcccagtgaacaaaagatggcgaggagacaccagtgcagggaggctaagggtgcagaggccgagtggggctgtgctcaaaagagaggcggtgctggagggacagggagaggtggcctgggtgttgggaggtgggggtgaggtgggggctgagggcaggggggtcagggtgagggataggaaaggccgcaggagaggagaggatgaagagctgtgctggaggcgctgtgggcagcatcgtcctgctcttgggcactttgtgttttgtgacacatcctttctatgctgaactgagaacccagggacctcactctccccacacgtgtctgtccagctccagaggatgaagcagagaccacccaagcagtgcccaccacaacccctgagccccccaacaagcctcgcctcggggagctgaccgtgacagatgccacccctgactccctcagcctgtcctggatggtccccgagggccagtttgaccacttcctggtccagtacaggaatggggatgggcagcccaaggtggtgcgggtgccggggcacgaggacggggtcaccatctcaggcctggagccagaccacaagtacaagatgaacctgtacggcttccacggtggccagcgcgtgggccccatctctgtcattggggtgacaggtgagtgtacgatgggagccccagagtggggcctgtgggagggtctccctttctctggtgatgggtgaactggcccaggaagcccctctgctcttggctgagccatggtacttttttgtctttccccacttccctgaggactgacagatcttcctgggtggagaagggccctgtgagctctgttggtggctgtcccaagttccccagcactgacctcagagcttgtcatgtgtgttgactgtaaactgagcaagaccacccagctccaaagatgggcctctccaagctgaccccaggacccccactcatggccacagcttcgctctccttcctcacaagacccaaggacatcccccagggaagctgcctcaccttctctgtcccctcttctcagctgcagaggaagaaactcccgcccccacagaacccagcacggaggccccggagccccctgaggagccgctcctgggggagctgacagtgacaggatcctcccctgactcgctgagcctctcctggaccatcccccagggccgcttcgactccttcactgtgcagtacaaggacagggacgggcggccccaggtggtgcgtgtcaggggcgaggagagcgaggtcaccgtggggggcctggagcccgggtgcaaatacaagatgcacctgtacggcctccacgaggggcagcgcgtgggcccagtgtccgctgtgggtgtgacaggtgagtaagtgtgagtgaggcgaggtggggaagatggccctggaagacactgctgtctctccagtcttcgtgaaaacatactctgaagagtattccttcctttgtgtatccaaatgcctggagatttttgttaaaaagcagatttggattcagcaggcttggcctagggcaagagaccatgcatttctttctttttctttctttcttttttttttttttgagatagagtctcgctttgtcacccaggctggagtacagtggctcaatctcggctcactggaacctccgcctcctgggttcaagtgattctcctacctcagcctcctgagtaactgggactacaggcgtgcgccaccacgcccagctaattttttcatatttttagtagagatgggtttcaccgtgttagccaggatggtctcaatctcctgacctcgtgatctgccctcctcggcctcccaaagtgctgggatcataggcgtgagccacggcgcccagccgaccatccatttctaacaagattctcatctatcttgatgccactggtccaaggaacacactttttttgttgttttttattgtagtaaagtacacttgacataattcgccattctaatcgctttctagtttgcagtccagcatgaagtccactcacattgctgtggactgtcaccctccacttccagaactcctcttcccacactgaaacttcctacccactagacacgaactcccattctccccttgccccagcccctggcaacaccattctactctctgtctctatgaatttgactctaggtacctcatataagtgcaatcatacaatatttgtcttttttgaatggttcatttcattaaatacaatgtctttaaggttcatctatgtcgtagcatcagtcagaatttcctttttattttattttctgtggcaatgggggtctcggtatgttgcccaggctggtctcaaactcctggcctcaagcgagtctcccaccttgacctcccaaagtgctgggattataggcaagagccactgcacctggccagaacttccttccttttcaggctgaataatgtttcgttttacacatacagaccacactttgctcatcctttcatccattgatggacatctgggttgcttccacctcttagctatcaagaataatgctgctatgaatatttgtgtgcaaatcacagaacacctttgtagcaaagctcctcccagtaacagatttggaaactctcttagaatttgttgaagcgaatttttcttgcattcatgaatcctcacagaggttaggctcagagttagggttcctgtcctaatgggaaaagttcctgtcctaatggggctaacgtcatgggggacaggctgtggaccagtaagaaagcaaaggcgggtgagcatgtgacaagaagcccagagccaggcaggaatacctaaaccaccctacctgtggatactcaggggacagtcaggatctgaggccaggcaggccttagcttggtgacagctttagagagaaggtgaagcgtgtcagatcagcacaggtggtgcaaaggccaggaggctagaaagagcatggtgtgtgagaagtactgaggattgagtggggtgtcctttgcagtgaatagatagtcctgaagtgtgggagcagaggaggcctggggtctcccagggatgaggatgtgattgcccaggtctgtgctgagatggccccagcagctgtgcctgtgtgaagctcatctgtgggggctaaagatggggatggggtggcagggagcctagaggcagggaagccaataggcagttggtggccctggtgagaggtgacagtggctcaaactaggatcggggactggaggttggggaggaaggtatccagggaaactcgggggagaggtaactctgaggctgctggcagctggtgaggggctgggtccaggaacacaccccaggctctggcctcgggaggagtgtgctgagcttgttgcagagcaaagacagaagcccagtgaacaaaagatggcgaggagaccccagtgcagggagggtaagggtgcagaggccaagtggagctgtgctcaaaagagaggcggtgctggagggacagggagaggtggcctgggtgttgggaggtgggggtgaggtgggggccgagggcaggggggtcagggtgagggataggaaaggccgcaggggaggagaggatgaagagctgtgctggaggcgctgtgggcagcatcgtcctgttcttgggcactttgtgttttgtgacacatcctttctatgctgaactgagaacccagggtcctcactgtccccacacgtgtctgtccagctccaaaggatgaagccgagaccacccaagcagtgcctaccatgacccctgagccccccatcaagcctcgcctgggggagctgaccgtgacagatgccacccccgactccctcagcctgtcctggatggttcccgagggccagtttgaccacttcctggtccagtacaggaatggggatgggcagcccaaggcggtgcgggtgccggggcacgaggacggggtcaccatctcaggcctggagccagaccataaatacaagatgaacctgtacggcttccacggtggccagcgcgtaggccctgtgtctgccattggggtgacgggtgagtgaatgatgggagccccagggtgggagctgtgggagggccacctcttgctctttggtgatgactggtggggaatgggacaggggtctggtcagcaccacagaactgcttgtggctggggctgggactccccttgggccttcctatgtggttgacccctggctccccctgagcagggaggggccatcaggagttttgctgtgctggtggctgtgccaggtccccccacagctgaccctggaacttgttacgtgtgttagctgtcagctgagcaggaccacccagccccaagaatggacttctctgaaatgacctcaggtcccccagtcatagccttggcttctccctccttttccccaggacccaaggacatccccctcactctctctccctccttctccactgcagaggaagagacccccagccccacagaacccagcactgaggccccggaggcccctgaggagccgctcctgggggagttgacagtgacaggatcctcccctgactcgctgagcctctcctggaccgtcccccagggccgcttcgactccttcaccgtgcagtacaaggacagggacgggcagccccaggtggtgcgtgtcaggggcgaggagagcgaggtcaccgtggggggcctggagcccgggcgcaaatacaagatgcatctgtacggcctccacgaggggcagcgcgtgggcccagtgtccaccgtgggcatcacgggtgagtggggggacaggccctcgtccccaggtttacctctgcagcccccttgtgtttctcctttggatcttggcacctcttttgactgggcctctaggtttctgtcttttctcccatgttgctaatgatcctgcctcatccttggattcatggagactgtgtggagtcagatgggcaggtagtccatgccctgtttgttgtagcttccttctcccattgtgatctggaacctccatgttgctcgtgtgctcatttgttagtcttcaggctcccttaaggagtattttagtggctcagaaagtgcttcagatccagctgcccagatctgcatgtgccttcgaatgtagtgattgtgcgactttgcaggcgtttcctaaccttgtgcttcagattcctgcaaagttggggtgatgataataatggcacccacttcatatgttgtgcgagggttaaatgcaccactgtttgtgagctgcttacagcaatgcagggcacagattctaaaacaagcgttttagaggaggccgctaagaaatgctcactccagtcctgggagagcactgcctcccttgcgcagggtcctgcctcctgacccatgggcctgctctgctcttttcagcgcccctgcccacaccactgccggtggagccccgcctgggggagctggcggtggcggccgtgacctcggactcagtgggcctctcatggacggtggcccagggcccctttgactccttcctggtacagtacagggacgcgcaggggcagccccaggcagtgcctgtgagcggagacctccgagcggtcgccgtctcggggctggacccggcccgcaagtacaagttcctgctctttggactccagaatgggaaacgccacggcccagtccctgtggaggccaggaccggtgagtgagggctggaggcctcccgcggccagagccttcgcccccttgtggcacctgttggaatttcacgttctgtgccccacactccagtcctcagcacccactgatttattgggtccaggaaaacccaggccctgagctctcctctcccactcacactcatccctctccctactttccctgcaccccaggggacacttgctttcttgtctggctcctcttttattcctactcctggcccagtcaccctcccgttcctgggaccggctcacagagccatagcagcccaggaagctccgtggcccctttgcctccatcccactctccatgcacctcactgtcttttccagccccagacaccaaaccgtctccccgcctgggggagctgactgtgacagatgcgacccctgactccgtgggcctctcgtggacggtccctgagggcgaattcgactccttcgtggtccagtacaaggataaggatggtcggctccaggtggtgccggtggcagccaaccagcgggaggtcacagtccagggcctggagcccagtaggaaatacaggttcctgctctatggtctgtcaggcaggaaacgactgggccccatctctgctgacagcaccacaggtgagtcccagtccagcctccaccttttccagagctgcctctcatccgagccctcagagctggccctgcagccttcccgtgagattccctctatcagccctgacacaaccatcttaactccgaaagtgagtccctctgtgtgtcaggcacagttctgaagcatatgcattacttcctttcattcgctgactgctgaggaaataaaagggacacgggctttggggccagcagatctgtgttccagttccagtcctagcctttgccagggtgaccatggacaagccgcttcatccccgggacctcagtgtcctcacctgcataatgctgggaatggcgctggactcagtagtggttcccatcctcctccctcctccctgactcggagccgaggggtggaagaaaagggagggcttggctatggaaagacgatggaaaaacctggtgtcactatgcctatgactcagctccctgaggaaggggtgtggtgggtcaccgaccctcaccccactcccaggaccatgagtcactatgcccagaggaggacagagcagccggccagtctgggcctgggtccctgggactccgtaattctcttcccaaaccctcactgtggggacggggtacagatccccacccatcggccccagccccacccgggcaagcctctgctctgccctctgttctcccagctaatcccctgtcttctccctgccccaccctggctgccccggcccagtggggtcagtgtggggctggggaagcaggaggcacggatgttcaggctgatggccacaaggggacaagggggagatcacagcctggcagtgatgggagccgtgcattggccggctgcccagaccagctctcgatgtttggggtgtctccgtgacaacccagagacctccggggagtctctctcagctctggcctcattcttgctcaggggctgggggtcagggtaaacaaaggccctctctgcacccccagccacccatccctcgggagatgatctgtaatgaatttggcgcatcctcgatcacagcagggaaggggcggggcaggaaggagtttgggcagcagcctccagaggaggagggggctgttctccctcattcctgtggggcatggcgggagcaggcctgtgtgtctcctcaaggagctgtccctggggctacactggagggaccatttcccagaacctcacacctccgggaggctgccagggcttaggcaaaggcagcatgtgactaagagctttccctcctccctctgcacagctcccctggagaaggagctacctccccacctgggggaactgaccgtggctgaggagacctccagctctctgcgcctgtcctggacggtagcccagggcccctttgactccttcgtggtccagtacagggacacggacgggcagcccagggcagtgcctgtggccgcagaccagcgcacagtcaccgtagaggacctggagcctggcaagaaatacaagtttctgctctacgggctccttgggggaaagcgcctgggcccggtctctgccctgggaatgacaggtgaggctgctgtgcctggctatagcaagccagcttgtgtgggtttccttgtgcatttgggctgaagacaaagatgactgcaggagtgggcaggccggagtggggcgccctggcctgtccccaggaaggaggaggagtctgcagccctgtgggcttcaacatccatcaaggagtccagagcaggagccaggccaggcgggagggaaaggccctgggaggggctctctaatctcccagccccgactctgccccgtcactgccactgctcctcattactcgctggggctgctgtcgcctccccgaagggtggccttgtccagatagcggcaaacctccctgccgtggatgagtcaggagcattttcttaagaggaacatcactggaaaacaaaatgagcggggacacagaaaccaacagcagtggctgcatttgtggtacaggctcctcttccagagctcgctgatgcccacctcagacaggcctgaccacggcacggctggtgggatttgccagtcacctcaaccagccagttccaccctcagcttctctcagaagggagcaccacactcctcaagctcagtgaatgtatcccggcatgggtggggccagagcctgtgatatctcgaggtgggctcggcaggacaccggggtgtggaagggggaagcgagcacctgactcagacagcgcgggagctcgcaggagtcacgaggccacagcgacttcattgtctgactgggcctggacctataaacttcccacctcagccttgggccaagcctggaagataaaaatggagcaccccatggcgcccctcactcagattctcccctgggcttctcccacgcagccccagaagaggacacaccagccccagagttagccccagaggcccctgagcctcctgaagagccccgcctaggagtgctgaccgtgaccgacacaaccccagactccatgcgcctctcgtggagcgtggcccagggcccctttgattccttcgtggtccagtatgaggacacgaacgggcagccccaggccttgctcgtggacggcgaccagagcaagatcctcatctcaggcctggagcccagcaccccctacaggttcctcctctatggcctccatgaagggaagcgcctggggcccctctcagctgagggcaccacaggtaccaccaggcgtctccggcctctagcctaggactcagaagggagaaacgggggctcagaaggggtggtcgcagggaaagagcgtgaggcgggtaccagggagagaggatggatgggctggatgcgagtggcctttagctctgccccacaggacccccctgtggctgcaagtccctggttacagatagagaaacaggggcagggaggggggtggaagggacgtgctctgggtcaccaagctggtgtgcttctgtctccaatcccttctcccccacccactccgtgcagggctggctcctgctggtcagacctcagaggagtcaaggccccgcctgtcccagctgtctgtgactgacgtgaccaccagttcactgaggctcaactgggaggccccaccgggggccttcgactccttcctgctccgctttggggttccatcaccaagcactctggagccgcatccgcgtccactgctgcagcgcgagctgatggtgccggggacacggcactcggccgtgctccgggacctgcgttccgggactctgtacagcctgacactgtatgggctgcgaggaccccacaaggccgacagcatccagggaaccgcccgcaccctcagcccaggtaaggacccacacacactctgccccaaagtgggggtctttgtacttcacgggggggacctagtgcctcagccagcggtgggggtgggcgagttggtggtgggcctggaggaatctgcagagcgacttccattcctggggactagaggaaaaggggtggtgagcctgtgctggagcagaggcgagggggggactcgcagggagaagcctccctgcccctgcctgcgtcattgttccttgacccctctgcagttctggagagcccccgtgacctccaattcagtgaaatcagggagacctcagccaaggtcaactggatgcccccaccatcccgggcggacagcttcaaagtctcctaccagctggcggacggaggtggtgcctttgccatgtgctcatcgcctcgcatttcctctcccccctgcactctgcccaccctccagccgccctggggttccctgggtaaccctcgatccccaatgttttcaggggagcctcagagtgtgcaggtggatggccaggcccggacccagaaactccaggggctgatcccaggcgctcgctatgaggtgaccgtggtctcggtccgaggctttgaggagagtgagcctctcacaggcttcctcaccacgggtgagatggactgggacccggggcaagaggtgggagccaagaaaacggcatgggtgggagttgagagagaacgaggagggtgaaagggaggtggtggaggctccgattgcggacgggaggccagtggagtctggggaggcacggagtagagagagccgcggggacccttctgagcccctccccttcccccagttcctgacggtcccacacagttgcgtgcactgaacttgaccgagggattcgccgtgctgcactggaagcccccccagaatcctgtggacacctatgacgtccaggtcacagcccctgggggtgagcaggcctgaggcctctggaggggacttgttcagggtggggattgcaggggggaggctggactctggccgaggatggagggggcaggccttgatgcccctctctacactcccagccccgcctctgcaggcggagaccccaggcagcgcggtggactaccccctgcatgaccttgtcctccacaccaactacaccgccacagtgcgtggcctgcggggccccaacctcacttccccagccagcatcaccttcaccacaggtagggtctgtggggtgtgtgggacagggagaggaggtagagggagccaggttgggcctcatccccatctcctcttcctgctttccctcctagggctagaggcccctcgggacttggaggccaaggaagtgaccccccgcaccgccctgctcacttggactgagcccccagtccggcccgcaggctacctgctcagcttccacacccctggtggacagaaccaggtgccccggccccactgacccaactcccctccctgggtgattccaggaggtgctgcctctggccctcccggagggtctccacctccctctcccctgacccccccttgtctgtcccacaggagatcctgctcccaggagggatcacatctcaccagctccttggcctctttccctccacctcctacaatgcacggctccaggccatgtggggccagagcctcctgccgcccgtgtccacctctttcaccacgggtacctggacgcacgggcccggggccgggggctgggtgggcagccagggcctaaggcttggaaaaggactggcccctgctctcctctcccaggtgggctgcggatccccttccccagggactgcggggaggagatgcagaacggagccggtgcctccaggaccagcaccatcttcctcaacggcaaccgcgagcggcccctgaacgtgttttgcgacatggagactgatgggggcggctggctggtgggtggcattgggaagcccaggggtctgtgcagggcagggtctgttgccccgggagccagaggctgatggtgcccccacttgcttcccaggtgttccagcgccgcatggatggacagacagacttctggagggactgggaggactatgcccatggttttgggaacatctctggagagttctggctgggtcagtgcctcacagggactggggaactacggatggggatgggggccctgtggacaccaggaccctgatgagggcacgtatcccacccccaggcaatgaggccctgcacagcctgacacaggcaggtgactactccatgcgcgtggacctgcgggctggggacgaggctgtgttcgcccagtacgactccttccacgtagactcggctgcggagtactaccgcctccacttggagggctaccacggcaccgcaggtaagcagaggctgtgaggctgggagggtgaggctgggaggggaggccctcatggctccttcctccaccctgcccaggggactccatgagctaccacagcggcagtgtcttctctgcccgtgatcgggaccccaacagcttgctcatctcctgcgctgtctcctaccgaggggcctggtggtacaggaactgccactacgccaacctcaacgggctctacgggagcacagtggaccatcaggtgaggggtggggaggcggctcagagctggggtggctggggctcggcctgcctaggtttcagccccacagtgtaacaggcaagggactgagtggctgggtgaaatggaacaatcatgccagcctcgcagagggagctggagttgatttattggctggaaagggccagctcagaattaagcctcaatcctctgcagcggagggtcaggaagggagctctgcggggaggttggttgagtgctgggagctacctccttaaggggaatgggaggagcagatgggacatccggctttgactctctcttgacaacccctttcccagggagtgagctggtaccactggaagggcttcgagttctcggtgcccttcacggaaatgaagctgagaccaagaaactttcgctccccagcggggggaggctgagctgctgcccacctctctcgcaccccagtatgactgccgagcactgaggggtcgccccgagagaagagccagggtccttcaccacccagccgctggaggaagccttctctgccagcgatctcgcagcactgtgtttacaggggggaggggaggggttcgtacaggagcaataaaggagaaactgaggtacccggctggcatcggtcctgccccatcactggctctggcccgggctgtgggcccccatcccccggggctgcagccgcacttggaaaggctgcatcttgaggatgacactgcagtggggcaggggctgcagggagggcagggcgtccccggagggcagcagcgtgaaggcctgcagcagtcgggtcagcaccacgaagagctccaggcgcgccagcggctcgcccaggcacacgcgggcaccgcagccgaaggccagagctctggagttcttgcctggctccaggaagcgatctgcgggcgggtggacaggtgggtggggaggcgttcagcggcagcggggaccagcctccaccacattttcacggcaggcccccggccccccacataccaggccagaactcatgtggcctctcccagaccgtctcatccaggtgggcgccttggaggttcggaatgatgactgtgccctcagggatgtcgtagccggagatgctgaagggggctggagttagaggctggccaggacctccctgggctcgggctttcctcactcatccccaaccctcgggagtcacctgctgggccgtgtggtgcggtggggcaaggctaagggcacaacgggccgcaggcgcagcacctcggcgatggtggcattgagcaagggcagccgtgcacggtccttgtaggggacccgggagctggaggcaccagggcccagttcgtggtctagctcctcctgcagtcgctgctgaatctggggaatgatc

SEQ ID NO: 1167 - DNA, 3282 bp, Homo sapiens
  Genbank Accession No. U95367
gggacagggctgaggatgaggagaaccctggggacccagaagaccgtgccttgcccggaagtcctgcctgtaggcctgaaggacttgccctaacagagcctcaacaactacctggtgattcctacttcagccccttggtgtgagcagcttctcaacatgaactacagcctccacttggccttcgtgtgtctgagtctcttcactgagaggatgtgcatccaggggagtcagttcaacgtcgaggtcggcagaagtgacaagctttccctgcctggctttgagaacctcacagcaggatataacaaatttctcaggcccaattttggtggagaacccgtacagatagcgctgactctggacattgcaagtatctctagcatttcagagagtaacatggactacacagccaccatatacctccgacagcgctggatggaccagcggctggtgtttgaaggcaacaagagcttcactctggatgcccgcctcgtggagttcctctgggtgccagatacttacattgtggagtccaagaagtccttcctccatgaagtcactgtgggaaacaggctcatccgcctcttctccaatggcacggtcctgtatgccctcagaatcacgacaactgttgcatgtaacatggatctgtctaaataccccatggacacacagacatgcaagttgcagctggaaagctggggctatgatggaaatgatgtggagttcacctggctgagagggaacgactctgtgcgtggactggaacacctgcggcttgctcagtacaccatagagcggtatttcaccttagtcaccagatcgcagcaggagacaggaaattacactagattggtcttacagtttgagcttcggaggaatgttctgtatttcattttggaaacctacgttccttccactttcctggtggtgttgtcctgggtttcattttggatctctctcgattcagtccctgcaagaacctgcattggagtgacgaccgtgttatcaatgaccacactgatgatcgggtcccgcacttctcttcccaacaccaactgcttcatcaaggccatcgatgtgtacctggggatctgctttagctttgtgtttggggccttgctagaatatgcagttgctcactacagttccttacagcagatggcagccaaagatagggggacaacaaaggaagtagaagaagtcagtattactaatatcatcaacagctccatctccagctttaaacggaagatcagctttgccagcattgaaatttccagcgacaacgttgactacagtgacttgacaatgaaaaccagcgacaagttcaagtttgtcttccgagaaaagatgggcaggattgttgattatttcacaattcaaaaccccagtaatgttgatcactattccaaactactgtttcctttgatttttatgctagccaatgtattttactgggcatactacatgtatttttgagtcaatgttaaatttcttgcatgccataggtcttcaacaggacaagataatgatgtaaatggtattttaggccaagtgtgcacccacatccaatggtgctacaagtgactgaaataatatttgagtctttctgctcaaagaatgaagctccaaccattgttctaagctgtgtagaagtcctagcattataggatcttgtaatagaaacatcagtccattcctctttcatcttaatcaaggacattcccatggagcccaagattacaaatgtactcagggctgtttattcggtggctccctggtttgcatttacctcatataaagaatgggaaggagaccattgggtaaccctcaagtgtcagaagttgtttctaaagtaactatacatgttttttactaaatctctgcagtgcttataaaatacattgttgcctatttagggagtaacattttctagtttttgtttctggttaaaatgaaatatgggcttatgtcaattcattggaagtcaatgcactaactcaataccaagatgagtttttaaataatgaatattatttaataccacaacagaattatccccaatttccaataagtcctatcattgaaaattcaaatataagtgaagaaaaaattagtagatcaacaatctaaacaaatccctcggttctaagatacaatggattccccatactggaaggactctgaggctttattcccccactatgcatatcttatcattttattattatacacacatccatcctaaactatactaaagcccttttcccatgcatggatggaaatggaagatttttttgtaacttgttctagaagtcttaatatgggctgttgccatgaaggcttgcagaattgagtccattttctagctgcctttattcacatagtgatggggtactaaaagtactgggttgactcagagagtcgctgtcattctgtcattgctgctactctaacactgagcaacactctcccagtggcagatcccctgtatcattccaagaggagcattcatccctttgctctaatgatcaggaatgatgcttattagaaaacaaactgcttgacccaggaacaagtggcttagcttaagtaaacttggctttgctcagatccctgatccttccagctggtctgctctgagtggcttatcccgcatgagcaggagcgtgctggccctgagtactgaactttctgagtaacaatgagacacgttacagaacctatgttcaggttgcgggtgagctgccctctccaaatccagccagagatgcacattcctcggccagtctcagccaacagtaccaaaagtgatttttgagtgtgccagggtaaaggcttccagttcagcctcagttattttagacaatctcgccatctttaatttcttagcttcctgttctaataaatgcacggctttacctttcctgtcagaaataaaccaaggctctaaaagatgatttcccttctgtaactccctagagccacaggttctcattccttttcccattatacttctcacaattcagtttctatgagtttgatcacctgatttttttaacaaaatatttctaacgggaatgggtgggagtgctggtgaaaagagatgaaatgtggttgtatgagccaatcatatttgtgattttttaaaaaaagtttaaaaggaaatatctgttctgaaaccccacttaagcattgtttttatataaaaacaatgataaagatgtgaactgtgaaataaatataccatattagctacccaccaaaaaaaaaaaaaaaaaa

SEQ ID NO: 1168 - DNA, 143068 bp, Homo sapiens
  Genbank Accession No. U95626
aagcttcagtatgcaaattttcaatgacatgtgcctgtggattctgaaaattcacagatctgtctatccttagctgagactgaaggcatctacttcccaatgaccaaatcctggtgctgtggcgacactgagcaggaactccattagaatatcaatatcactctgcagacattccatgatgtaagctatgttttctcttgttgcaattacacttaatttaccaccagctgcttcaatgtcatgggctatcttgaaaaatgaagctcctttcgtagtcaaactggatgcaagacacagcaaatgagaagttactaaattgttggagtcctcatagctactgcctgctttaatgaacaaaccaattcttgatgcagggcatagttttccaaaggagaaatcataaaaccatttggaaatttgatgatctcaaggtcctgatgatgtggagccactcctatgggggtagctgtggctttaactttgggggcaactttgagggaataaagtctcaaaaagagggaataaagtctcaagattgttcgtgacccatagtaacttctggcttaaaggaccattcggcaagtttttaaatgtattttctataatttccatgtagttctttatattttctatttcttatttaaaacctctattttagctcgtttcctttgacactgctctggcagggaaaggggtggcactgcctcattactgccaggtaggggtagaagtccattatccacttggtctccattgatacccaaagtggggagaggctcctgttactgctggtgagggtgggagtccccccactaagtttctgctaatactgtcctggtggcttgctactattcccatgaagcctccactgatactacattacttttgggtggtggcaaatgtcctgcctctccactagccctcctgctctaaaacaacccgagtagggagtgggaaggaagctttgttactggtaggtgggagctgaagtccagacttgccacattgtcccactgatgctacagggaggaggaagcgggccacattactgcctgatagggatgaaagccccagctccctacctggccttcgctgataccagcctgctacaggagtgaagagagatttgaaggcctcaatatagcctgtcgagggtggaagtcttgctcccaatgggcctttagcagcatgggtgggtgtggggccatagctgtctctgtactgcttggctagagtggagtatttgaggtccaaaagttttctgtctttctagccctttggttagaaagagcagacttttgttggaagtatttttttgtgtttacctgttgtatttccaggttcctagcttctccagcacagtctgggatgtgtgagacacagagaaaatccagtgatgttactaccgtatggtttcttgggtcccaacgtctctagctaatctgctccaccttttggagttttcttatttgttttagatcagggatttagtcatatttaataggagaaatatggaaaaatacttctactctatcttcctggaagttcctgtttattttttatgtccttttcctctggctagaccgtaagagacttacgaaacaaacacttacacattctactaaactcaatgtccaaagtttgtgaacttcttgaatattgcttgttcatttccacccccagtcactgactgaatctccctgctgtctgtctacaatgccaatgagcttctggttaacttcttctcatgcatgcttaggcaacaacttcccagttttactacacttgcccatccctagttttgttgttgcttaatcccttggcctagtgccaccatactcctccagcagagcaaccaattcttacattataggacagcacatatccactaaaaacagttcatgccacaccaaccacatttccctttgtcaacaaaattacttgatagataattccaggaatgcctgatgaagctgattgacaacaagatatttggcagactctctgctgcctatacataccttagcatgtggaactcaagtaatgagaggtccatttaattggattgaattgggctggataggattggattgaatcctgtgggatggctaggctaaattagaaatgaagactagtttaacagcagtatccaaggatagttgactaatgagttaattttactctcaaagacagtctttagtagtaagctgtaatgcattatatcaaactattttccagtcaatgatttataagttacttgaataaggatgctaaagatgtgccttattgaaatggcaattagcacaaagttgggaatgaaatctaattagttaaataacagaatcacataaaaaaggacttgaataaatgtagcatcctaccatgttcctggatagaaagactgctatcgtaaagatattcattctcctcaggttaaattataaactcaatgcaattcaacaggattttaaaaaactagacaaagtgattccaagtttacgtggaaaataaaatgtgagggaccaaacaatatttgaaaaagaaagagaataaaatctcatccttccagataccacaatgtattataaagcaatagtaattaacatgagggcagaaatgagcaagcaagtgaacaaaataagacagatagtcacaggaaactcatatatttataggtgctttgcgtataatgaagatggtccttcaaatcagttgggaaaagatgggttattcaataaatggtgttgggtaaaattggttatacattggtgagaaataaagtgaaactcctactttgtatcatatgcaaaaaatagattccagacagatgaaatatttaaatgtaaaaaataaaattctaaaactactagaaaaaaaagaagaatatttttattcctttgaaatagaaaaggtcttactaagcaaaacacagaagtaataaatgaataaatgaagacaaatatgataaaaataagttaaaaatataagcaatctttctttgtttttttttcacctttcctagaaaaaaatatataggcaacttgttaagcaaggtagattacaagaaaatatttacaacatttgacaggccacagattattatccagcctcatctgataagaaaacttcaacataaagatatctgttttttttcttataaggttcctcaaagtgagccaatcacttcttaagctgaacaaaaaacaaaacagaagtgatcttttccaataatgaaaacaaacattgacagagcagctgtaggatcctttcaggcaaattatgaaaaggtgccctttctcagaaaccacagttaccattcagctttgtgaccagaggtttgactgtaccctagtccctactagcaacccaaccacataaccaacttcaaaggtcctgaatgactgtgttgtacttaatggcagatgatctatctcccatttttgtcctaaggattttccaagataatatatttctgcatttgttttgcttttacttcactccaaattgaaatctatttgtgggataagactaaagaaatgcttataggaaaattgatagcaccaaattcctatcttaaaaaatgaaaaaggtttcaaatcaatgacctcagcttttactttaagaaaatagaaaaagcaggataagctaaagccaaagtaaacagaagaaaggaaattataaagataagagcagaaatcaatgaatagaaaacaaaagaaaaaaatcaaaccaaacagctgattctttaagcagatctataaaattgataaaactctagccagattgatcaagtaaaaaagagagaagacacaaattaccagtattaagaatgagagaggcaatatcactacagatcctacagatataaaaagtataagggcatactttgaataattttatgactataaattaggcaacttagataaaacaaatttcttgaaagacacaaacaaccaaagctcacctaaaatactcacaaattgaatagtcttatagctattacaaaattgaggccaggcgcagtggctcaagcctttaatcccagcactttgggagggctaggaaggcggatcacgaggtcaggagtttgagaccagcctgactaacatggtgaaaccctgtctctactaaaagtacaaaaattagccaggcttggtggtgcgtgcctgtaatcccatctactcaggagactgaggcaggagaattgcttgaacctgggaggcaaagttgtggtgagccgagatcgcgccactgcacttcagcctgggcaacagaacaagactccgtctcaaaaaaaaaaaaaaaaaaaaaaattgaaattatagttaaaagtcttcccacaaagcaaactctagacccagatggcttcaatggtaaattctactggacaatcaaacaggaaacagtaataattctccacaatgtctttcataaaattgatgcggaggagatactctccaactcattctatgaaactagcattaccctgataccaaaatcatacagagacagtgtaggaaaacaacagatcagtatccttcatgaacataaatgaagtacaatgcagtcttatgcataaatcagagcttcattgttctacagataaggtaatgtaggattgttggttgcccctccaggtctgttaaattcacctccttccccagagagcatccttcttaaggacagggagcctcaatatgtcagtcctcacagcacctccctcagtcttcagcacttaccagctcatcaccacaaccgataccacattggataatttcatgaattactttagagcaaatgcaagagaaaaaatggatttttatataggagaagaaggaggaaattcttgtggatttggtacagaatagggccaagggaaaattacagatgtaaaaagaaaagtgtgtgaaatagtatccttagtgctcacaaatacaatgatttcattgtttttaaaaataaaaaatgacaaatgtctaatgcttggtggtaatgctttattgaatgtgtgttatacactggttcctcattcctgaagttagaaataataccttcctcttttcatttggttatgtttgctgaaacaaatcaaaggctgagattgaaacacatgctacttcaggtggatgaccttactactaagctcatcacaacagcacttacagctgaagaccccagagtcctacctaacttttgtcacaacccagattttggccatgtagttctgggccttaccattaaagcagacagaagtcagaggaatgactcctttccacttgaagtgagctgcaggcttctaggaaaggcaagatgcacatttccctcctgtggagcataaagcctttgtaattcaggacttaggacccatatggatttgaaatattatgacattggagctggagtggttggggacaacaccagtagtgttataggccatggaatgtcaaaagaacatggaaccctgttaaaatcattaaacatcaaaactctcccctcctctggtgatatggtttggctgtgtccccatccaaatctcatcttgaactcccatgtgttgtgggaggcacccagtgggaggtaattgaatcatgggggcaggtctttcccatgctgttttcacgatactgaataagtctcacaagatctgatggttttataaaggggagcttccctgcacaagctctcttctcttgtctgccaccatgtgagacatgcctttcaccttccgccatgattgtgaggcctccccaaccatgtggaacttttaagttcattaaacctcttccttttgtaaattgctcagtctcaaatatgtctttatcagcaacgtgaaaacagactatctgattttctgtgggatgtggattatgaccatggacagagcataactgggacagagctggaaaaaatattaattaggtgcttaaaaatatttgttagaactatcttcatgaatgagaatcaatcctgtttccatggtgattcaccaggcatcaattccaagcatccatgaatcagaaaagtcctatcttctcttagttatcatccaggactccaaggaaccataattagccaacctgttcacatttccttttcattcactagcctcgaagtttccaggggacagggactctgtcctattcatttctgtaaccttaccacctgacccagaatagctgttccctgaagatttggtggattataaatgtggatgtcttatttctttgaaagtgtgagcttcaggtactgatcacgttattccaattatcaatttagtatctttcttcaccattaaactgtgaaattcttgagggaagaacctatgactgatttatctctgtaaactcatgccaccagtattcaaaatcacacctagcacatagtaaacactcaatgtttgttgaatgactgaaggaatggatgaaaatgaacctccttgcttctgaccagtggatgagttgcttggccgtgttcctacagcctagagctcatcccctaaagcatctgaagttacccattagtgcaatggttcttgaacgctggtgttgatcagaatcatctggatgcccaggttctctgaaataagatagggtctaggcatttgtatttttaccaaggaggtgtgatggagtcagatgcaagaaggctagttgaagaaaccacatgagagtttagtgtagtgtattagaagactggtttggctctgtcgctagtggctacatcatcttgctcaagtcatgccagtctcaggacctcattcagtctcttcagctgtaatatgggtgggttgcaccacataaccagaaagatcccttccagctctacccacttacaacatggtcaaatttggtctgattttttaaatcgtagtacaatatatatgacataaaattcaccattttagccactttaaatgtacaattctgtagcattaactacattcacattgttgtgcaaccatcactaccgtctacttccagaactcttcatcttgcaaaactgaacctctgttgtcattagtcactaactattcctctccccccctccttctaggccctggcaatcaccattctactttctgtcgctatgaatttgactactctaggtaacttatataagtggaatcacagcatttgccctattatgactggtttagttgacttagcacaacctcctaaggctcaaccacattttagcatgtgtcagaattttctttgtttttaaggctgaataatattctgttgtatctgtaaataacatctttattcatttgtccatcaacagactgttgagttcctcccatcttttgactattgtgaaaaatgctgctatgaacctgagtgtacagacatctggttgagtactgctttcaattcattgtttatatggatcatatggtaattttatgtttaatttttttggaactgctacattgttttccacagtgtacatcattttacatttccatcagcaatgcacaaaggttccaatttctccacattcttaccaacattttttattttctgtttcttatttatttgtttatttattctgagacagagtctcactctgtcacctaggctggagtgcagcagggtgatctcagctcactgcaacctctgcctcccatgttcaagtgattctcctccctcagcctcccaagtaaatggaattacaggtgcccaccaccacgcccaggtaatttttgcattttttttagtagtgatgaggtttcaccatgttggtcaggctggtcttgaactcctgacctcaagtgatccacccgcctcagcctcccaaagtgctgggattacaggtatgaaccactgcacccaggccattttttgctttttagataatagtcatcctagtgggtatgaagtggtatttcattgtggttttgatttatatttccctaatgatcagtgatattgagcatctttcaagtgcttattggccattttcttctttggagaaatgtctatgcaagtcctttgctcattttttaatccagttgctttttgttattctttttgatttgaaagtgttctttatacctcttgtatactaatcccttatcagatatgatttataaatattttcttcttttccatggattgccctttttactctgttgatagtgttctttgatacaaaataatttttaatttgaatgaagcccaattaatctatttttgtttcttttgttgcctgtgcttttggtgtcctatccaagaaactgttgccaaatccaatgtcataaagctttttcccatgcttccttctaagagttttgtagttacagctcttgtatttaggtatttgactattttgagttaatttttgtacatcgtataaaataagaatccaatttttattttattttactttttgtatgtggatatccaatttccccaccaccattcattgaaaagactgtccttttcctatcgaatggtcttggcacccttgtaaaacataatttgaccatatatgtgagggtttatttctgggctctctattctattctattctattctattctattctattctattctattctattctattctattctattggtccctatgtctttctttattctagtaccaccattttgctcatcataactttgtagtaagttttgaagtcaggaatcgtaagacctccagctttgttcattttcaaggttgttttgattattcaaggtcccttgatagtccatatgaatttcaggatggatttttctatttctgcaaaaaaaaaaaaaaaaaaaaaaaaaatcattgaaatttttaaacagattgcattaaatctgtagattgttttgggtagtattgacatttaacaacattaaatcttccaatcaatgaactaggctatttttatttattttttctgtttctttgagctacttttgtagttttcagtgtataagtttttgctacctggttaggtatacttctaagtattttctactttttgatgctattgcacattgaatcgttttcttaatttggtggtagcggggattgtgcattgttagtacataaaaatgcaactcattttttgtgtgttgattttgtatcctgcagctttaacaaattcatgttagttctaacagacttattctatgaatcattagggttttctacataaaagatcatgtcacctacaaacagagataattttactccaccccttcccgttgcaatgccttttatgtctttttcttgcctaattgttctggctaagacttccactaccatgttgaatagaagtggtgaaagtagacatccttgtcttgttccaatcttagagccaaagctttcagtctttcacggcctgaaagactttgtaatatgttctcaaggttaaagaacttcagaagttttctaagcaagagaccattttattaacttagttggcagcaattctgagagattagaatgaaaagatagaggataagaagtatctggcaggtataatatattgagtgtgctgaatatacttttagttttgtataggtgttaaaaaatggcaaaggaggccgggcgtggtggctcacgcctgtaatcccagcactttgggaggccgaggcgggcagatcatgaggtcaggagatcgagaccatcctggctaaaacagtgaaaccctatctctactaaaaatacaaaaaactcgctgggcatggtggtggacacctgtagtcccagctactcgggaggctgaggcaggagaatggtgtgaacctggaaggtggagcttgcagtgagccgagatcacgccactgcactccagcctgggcgacagagagagactccgtctcaaaagaaaaaaaaaatggcaaaggaaagaatgaaaaataaagcaaggtcccagaagaggccaaaaatcttaatcaaaattgactgaacattacggaatgaaatggtttttcctttactccaattaacgacttcacaagaagattccatcctcgtttataagattaacccaaaaccagcacttaaaaccagaagccttgaaaggatggagtttggggacccttctcatgtctattcccagaagggggtcttcttctggggtcctgtcccctaaagagctaggcaaaaagtatgcttgccacatctgttgaaagatagaaagttggtctaaaaatacatgagagggaactgaaacatttcagagaaggcaagactcagaagtaagaaaccaaaagaggaaggtaaaattctagttacaaagaaaagaggaatggaaattaaattgtcttacagagaaaatccagaactgccccctcttcccttactactccatcaaaaaaggggaaaaatagtcaatgggaaagttttgagaaaaatagatctctgcattcttctggttgagaattcagacaacttgaactagagagctgggtaatttcttgactaaaggtgtgttagatctgaaagggtttttcttaaaattgtctgtgttcatccctcccatcttagagaggaacacaggataagagacctctggagctcccccagggtcaccgagctaataggatcagagacaaagctacaaagtcattttctgacatctctccagggctctttttttctggaccccccatatcaacatgatgtatttattacattggattagcaactctccttgagctttcctcagtaccaggtttacatctcagtctgtgggtctcagagaaagtacccaatcagcagcaacattacctggaaactcatcagaagtgcccctcctcagccccaccccagatctatgcaatcagaaactctggaaatgcaggccagtcctaacaagcccaccagggaattctggtgcactaaggtttgagatccactgatcaaagaaataatattccttttcttcattataatagcatgaataataactaacatgtatttcacaatttacaaaagagctttatgctcttgttaaatttgagggtagtcttctcaaaatctctgtgaggctagaaagtcagatattgaaacacctgttttatgggttcaaagataggttcaaaagagagtaaatgattgttggggtggcaggtccagagagggcaggatcaaaactgcaattgagtcttctgccttataaaccagcatagcttccccaaggcacgtcacttctcgataaaatggtgacaactagagtgtcctttcagatcattcttagaagcatggagtgctaggtcaattgtgtaattgatgaggaaataataatactaagaactcccatcttctacgtccttatatacaatcctgtcaggtagaagctgagtctcagagagaacaagttgccctcccaggaccaccaggtaagctcggcatagctgtgcttagaatgtaggctgtctggcttctgggcttgcctgcccagggaggctttgtgggttctacttggtcatccagatcacagaggggcagcactgactcctacccagtgctcttgactgtacatctaatactttctactaagaaaaccccttctctttagaccaatggttttcaaatcttggtgtgcattggaatcacctggaaagcttgttaaaacacagattgtcccaccccaagagtttctgattctgtaggctggggtggggacccatgaaagtgcatttctaataaggtcccaagtgatgctgatgccaccagtgtgtggacaaccctttgagtggtgaagctctggacaccctaatttgcaaggctaatcaggcatatgtggcaaatgaatacgaactgaaattctgactccaatatcttcactgatattcctaatccatagcatacacacagtcccattcgtttcccttttagcttttaatctacatttatcctttcttcctctgccactgccttctctccagttagctcaaaccaggtaacacataaccgcctcctaactcatccgcccagttggtttctttggctttaatctagacttcttatctccaccagatttgccttaccaaagcaccaatttcttaaggcagggttagaattaaaaatcttctgttcctcctcattgcctaaaactcctaaacttatgattcaaggtcttccatgaccttcatggaccagtctaacgttttagcctgtcctaagtgacatgcctccaccacatacttcatgctttccactttctttctccatgtctttgttcatgcatttccatttcttctacctgcgatgtcctccttcgccatctctgtagatttaaaaatcctacagggctcatctcaaatgccctttccttcatgaagcctttcatgaaatccccatcgagaggttttccctcctctcagctctccaaagcacagatgtctgcgtttgtggctattatcttacgttgttttgtattaaaatttctccagctttacacatttgtcatcctcttaaggacaaacatcttattatggtcaatgtgaagctatagaggataatttaatgaaatattccaagggctagtcattacacatgactgatttatctctgtaaactcatccacactcatccacctgattttgattggccaagttaatgaatcagagaggaaaagatggtaaaaatataataaaaatctcctaggtagtctcacatcccacagagccccaggtaatgaaatgaggccctgagataatactttatgaacaataaaactccgggttctattgacagtgaagcaagacctgagagagaaggctaaattcccttgtgtctagctgccacaatcttctgagaataatggcctttcttcccgtctgccttctgaatcataggcaaatttttctctttggtgatccctaatacagaaaggggaagtcaaataaaatatatacaaggagaaggattctgggagacagagtttcttgattcccttctgcatgctcctcctcaaaagcctttatgagcttaccttacatttaaattcttttaaacaaggcattatgtggtctggtcttttccagctccacacaccttcacactacattccccccagctaattctgctctgggaacactgaccttcttttagttctttgaacacattgatttctggtcaagatgactcagtaacttcaacctttgttgtgcccttggtgctgtgaagatatagatatatattaaccactgcacaccagaaatcagaaatagcacaacagagaataaagtcattgagccatcttctgagctccaaaagacaaattttctccaaaaagacaaattcaggctctaaaacaataccttaaggaaccagaagtggaatagaaaattaaggtggtaagcagggctaaaccacatgcctgttgagcccaggtttggaagaagacaatggcaggtaggaatgtggtttctgatgggtaataggtactgttttcatttactttctgttgcttataacagaatatctgaaactgggtgctttataaagaaaaggaatttatgtcttgcagttagggaaactgagaagtcaaaagttgagggctgcaattgacaagtgccttcttgctggtggggatactctgaagagtcttgaggtggtatcgggcataccactctcagtgaggggactgagcatactaggtcaggtctttcttcctccttttataaagctatcagtcccactcttatgataacccattaatccattaactgattagccaattaatccatgaatggattaattcattcatgagggcagagccttcctgacccaaacacctcttaaagactccacctctcaatactgccacatgggggattaaatttcagcatgagtttttgatgagacaaatattccaatgatagcagttattaaaagtacatgcttgagagaaggggattggagtcagcctcagtgcttaaactcaaaagctaggatgaggctctaacactcctgaaagaaggagttgctgctggctccttaccagggctatatcttttacagagcaggagacctaaagaggcaggaggacccggacatcgtttggaaaccaagcactaaaacaggccatctgttatacccccaatatcctctcaggacaagtgttttgaaccactcacacaaggactagtctgggcaagtgggctagatgaagaaaccacaaaatagctaagtggggagagaaagaccaaaaatactattttattcaaaatgaaaatacaatccaaaattccatgattcatgaagaaatcaaatggtatgtgttaggtggttcttgcattgctatagagaaatacctgagattgggtaatttataaagaaaagaagtttaattggctcataattctgcaggcttcacaggaagcatggtgctggcatctgctcagcttctggagaggccccaagaagatttgctcaaggcagaaggttaagggagagctggcacatcacatggtgagaaaggaagctagagagagagtgcagggtgaggtgccacaagttaccacagccagatctcttgagaactcacttactttcatgaggacagcaccaagccataaggtgtagggagccaaagtcccatgggacatgaccaactcagcattccactggaggctatatgatcaaacagcaaactgtttatcacgaatgcaggatgtgagcaaactcacaactggtcctgccaacagaaggtttgttggaggcaatcactccctggtgcctgaggtaatctactgcaacatctagagaatgcagtcttgcaagcctactctggacagggcagctggcaccttattccatcccccttctcactatctttttttgcctaataaatacagagggctgtgtaaagctcagggcccttgtccactagaggcaagttgccccctgaccccttcttccaaatatactcttttgtctcttgtcttttattctcacatttgccccctttgttcagttccactaggtccgtgcgggttatatactggtgccctgagcagcaacagaatcaggctctcaacaagtgtcatccgaacatgggactttgaggacatgaacgaagaaggtctgctggagcagaggaacagaaattgacaaggtgaacagggaccctgggacgagtctgccagcagcggatataaggtcagttacctaaagaggtactgatcagtgccctaaagagatactgggagcagtgctttaaagaagtactgggaatgggaaattttctgaatcagggtaacaaggggaagaatttgtctattaaagaaaaacattatgtgcagttgcttaaagttgtattggaacagtctggagcttaggttaatttgcagacactaactatcacatgcgtccgtgtgaagagagtccaccaacaggctttgtgtgggcaataaagctttttaatcaccttggtgcaggtgggctgagtccaaaaaaggagtcagcaaagggagatagaggtggggcagttttataggatttgggtaggtagtggaaagttacagttaaaagtggttatctcttgtgggcagaggcaggggtcacaaggtgctgggtggggaaatcatgagactctttttctgggacaggagtgtcacaaggtcaattgatcagttggggtggggcaggaacaaatcgcaatggtggaatgtcatcacttaaggcaggaactgactatttcacttcttttgtggttcttcagttgtttcgggccatctggatgtatagtgcagctcacaggggatatgatggcttaggttgggctcagagacctgacattcctatctttttatattaataagaaaaacaaaacaaaatagtggttaagtgttggggcagcaaaaattttttggggtggtatgtagagataaggggcaatgtttctcagggctgcttcaagcacgatcacggtggtgtgggaatctagagtgggagagattaagctgaagaaaaattttggggaaaggggtgatattctggggttgttagaaggagcatttgtcatatagaatgatgatggcctggatgtggttttgtatgaattgagaaactaaacggaagacacaaggtccaaataagagaaggagaaaaacaggcattaaaggattaagaattgggaggacacaggacatccaattagagagtgcccaagggggtccagtgtaattatttgcctggacaatgagttttggggctctattaggttgtcatataccaggccagattgatttaggtaaaaacaacactcttcatttaaaatatacagagtcctccttttttagcagtgagtaagttgagacctattcctgtcttcttatattaataagtaaaataaagcaaaatagaggtgaagtgttggtgtcatgaggggaacaggaagcagttcggtcctatttgcaaattgattttgggggggtaaagaaaactagtgtacctttgcctgtccaattaataagtagacacatgtagatggaggagccacagaggaagaagagaactttgtaaggcaaaactggaaatgtaaagggaaaagatgagagggagcaccaaaagaggtgtcttgcacccagactcagggatctagtgagagcagcagctgttagaggttgtaatggggattaatggggctactgggtagagggggaggttcaacttttatggtgtatgagaaagcgcatagtgtctacaagcaacctttcattgctattcataggattgggtataagtaaacaagaagggggggctaggaggagagtctgaagaacaaggggaaggtagccaaggatggagtgaaatgtagggcaaatgtcttaaaggaaatgagaggttctaagaggagggctagtggcttgtaacccacatggaagaggttacgaaaggatgatagaatggaatgagcctgtgaggctggaaggaggaattttccttggtccaagaaccatttgccttgtgtgggaagagtttgataggtggaagtttcagtgggagggtaggcgggagtgactgatgagaaggagaaaaactggccataagggacagaagttggaatgctagctgctcctttagctaccttatcagcataagctttgccctgagtgatgggatctgatgccttttgatggcgcttgcagtgaatgaccctagcttccttggaagtagagcagctttaagaagagtttttatgaagaaggcattaataatggaggaccctcgtatagtgaggaaacctctttcaggccatataacagaatggaggtggagaatatggaaggcatatttagagtcagtataaatactgacacacaatccttttgcaagagtgagggctcgagttaaggcaatgagttcggcttgctgagagggagtggagtggggcagagtggtagcctcaatgatagatgtgaaagatactatagcgtagcctgcctttgctggtgagtggtgattaggcctagtggaactgccatcaataaaccaagtgtgatcagagtgaggaacaggaaagaaggaaatatgggaaaatggagtgaatgctaggtggatcagagagatacagtcatggggatcaggtgtggtatcaggaataatgtgggaggccagattgaagtccaggccaggaacaatggtaattgtgggagactcaacaaagagtgagttcaactgaaggagccgggggagggggagagcggcagaaagtatatgcatcaggtgtgaggaagaaaatacattttgaaagttatgagaactgtagagagtgagttgatcatagtttgtgattttgagggcctttaaaagtattaaagcagtggcagctgccacacacagacatgagagccagcctaaaacagtaaggtcaatctgtttagacagaaaggctgcagggcactgtccaagctcttgtgtaaggattctgaccgcacagccttgtactttggctgtgtgtaatgaaaagggttgggatgagttagggagagctagtgtgggagtagcttctagggctgtttttaaggaacataaagaggagtggggaaaggatttaggatctatggggtcagctaggtttccttttgtgagtttatgtaatggtttagtcaggatggcaaaaccaggtatccaaaggtgaaagtacccaaccatgtctaggaaggaaaggatttgttgctttgtagaagggattggggtttgggagattagccggacacagatcaggagggagagcacttgtatttttatgaagaattatgccgataggtaacggatgaggaagaaatttgggctttggagggggatacacgatattcccttgagaatagatgttggaggagcaggagggtgtcctgttgggaagattcataggaggggctataaagtagaaggccatcaaaatattgaataaggtgacaagcagatggacagaaaagtaaattatgagaaagggcttgactgaagtaatggaggctgtccctgaagccttgtggcagtacagcccaggtaagttgctgagactgatgggtgtcagggtcagtccaagtgtaagtgaagagaggctggggtgaagagtgcaaaggaatagtaaagaaagcatcttcaagatccagaacagaataatgggttgtggagggaggtattgaggataggagagtatatgggtttggcaccacagagtggataggcaagacaatttggttgataagctgaagatcctggacaggctttagtcccttcaaagcctgttgtgggatgggatactggcattgagcaggataagggtaattaggttttaatgggatggtagggttgcgtgatcggtcaccaaggagggagtagaggtatcccatacttgtgggttaagatagggagtcaggaggggaggttgtgaaggaggctttgaactggggaaaagggtggcaatgaggtgtggctgtagcccaggaatagtcagggaagcagataatttagttaaaatgtctcaatttaataagggagctgggcaggtgggaataactaaaaaggagtgcataaaagaatgttgtccaagttggcaccagagttggggagttttaagaggtttagcagcctgaccatcaataaccacaacagttatggaggcaagggaaacaggcccttgaaaggaaagtaatatggagtgggtagcctccatattgattaagaaagggacagacttaccctccactgtaagagttacccaaagtgtctgtgatgatccaggaggcttctgaggtgatcaggcagtgtcagtcttcagctgctaagctgagaagatctgggaaggagtcagtcagagagccctgggccagagttccaggggctctgggagtggctgacgggcaagttggacagtccgatttccaatgcggtcccacacagatgggatacagtttaggaggaatcctgggctgtaggcattccttggcccagtggccagatttctagcacttgaagcaagatcctggaggaatgcctgaccacagtggtttaggtgttttgaagttcttgtgtgctggagatgtggctgaggtttttctcacagcagaggcaagtaattgcaactcagaaatacattgccacttggctgtctcttctctattattgtacaccttgaaggtgaggttaattaagtcctgttgtggggtttgagggccataatctaatttttgaagcttttttaatgttgggagtggattgggtaataaaatgcatattgagagtaagacagccttctggcccctctgaacctagggcagtaaaatgtctaagagttgttgccaaagggaccatggactgggctgcgttttcatatttgatgaaaaaaaaagagcctaaatgctaactaatttgggagaggtcagataaagtaaaaggaacattaatcttgactatgccttcagctcttgccacctctctaagaggaaattgttgggcaagtggaggagtgctagtcgtggaatgaaaccataagctggactgggtgtgaggaggggaggtgatagaaggattacagcgtaggggagtagaggctgaggaagaattgggacctggctcagcctggtgaggagtggcctggtgaggagcagcctggggaggaggagagaggttagatgggttcgtagaaaagaaggattcaaaggactcggagcttggtgaggagactgaaggaacagacaggagagaaagaagaaagatttgggacaagtcgcattgggagcagagactaggaagggagtgatgtgtaaagaatgcctggacatcaggcacctcagaccatttgcccattttatgacaaaaattatctaagtcttgtagggtggagaaatcaaaagtgccattttctggccatttggaacaattatcgagtttgtattggggccaaatggtgttgcagaagaaaataagatgcttaggttttaggtcaggtgagagttgaagaggttttaggttttttagaacacaggctaaggcagaagaaggaggaatggagggtggaaggctgcccataataaaaaggtaagtttagagaaaagagaggatagagacacagagagagggggtggtggtactcatcagccaggggaggtggtacttgccaccaaggtgatggatcaaggcagtcatccccacggtgatcagacacctctgaaatgtgggtgaataatcaggcaggtgtccctgcagtgattagacaccaaggggagactgtcttcccgagtccgtgaccggtgctggagttttgagttcacagataaaacacatctcctctgtctctaccagaaagggaaaggaactgaaattaaggaagggagagattgaagggtggagagatagcaagagagttggaaaagagaataaaaagaggccacttactcaatttaaaattggtgagatgttccttgggctgatctgaggacccaaggttgtaggtggatctcctcacggaatgagggtgaggacaggggactggtctccagaaggagttcccgagtcctggatcttcagcaccaaatgtcatgtgcatccatgtgaagagagtccaccaacaggctttgtgttatcaataaagctttttaatcaccttggtgcaggtgggctgagtctgaaaaaggagtcagcaaagagagataggggtgggtcagttttataagatttgggtaggtagtggaaagttacagttagaggtggttatctcttgagggcagaggtgggggtcacaaggtgctgggtggggaaatcctgagacttatcatccagggaaggagtgtcacaaggtcgattgatcagttggggtggggcaggaacaaatcgcatggtggaatgtcatcagttaaggcaggaactcactatttcacttcttttgtggttcttcagtttcttcaggccatctggatgtacacgtgaaggttacggggatatatgatggcttagcttgggctcagaggcctgacactaacctcctgcagaagccacaaaaggttattacacataaaccatggtttccacaggcaggcactcttgatgtggaaaattgggatagagcaggattaaaacaagctcatcaaaaaggtcttaaagttgattcttcagttttctccacttggagtttagttcatactgtacttctgccattatctccttattattctgcggaacagcaggctgaatctaaaaattggaaagaatttgttgtcctactcacagctccaattgaatataaaaaacaggagagggaggataaaaattggcctataccgcctcctccagatgcagaaacatctgtaccatctccttcagtggcagaaatagagatcccagtacaaagaattttatgctctgctgtcatagctggagagcccttaggaccttgtgcttttcctatttctgtaaggcctgatccaaataatccacagcagtttattcatgaacactctccactagaatttaagttgttgaaggaattaaaaactagtgtggtcaataatggagtacaaagccaatggttcctggaggaaggaatgctagacatagaactttgggagcaagtggggagaaatcttaaacaacaccaggcacaaaggcatcaggtcccagtaaaatcttttatgttaggggctttgagtagagcagccctggttgttacacacaaaagagcctaaaaagggaaaggaggaggaaatgtcacctgccttatcacctccccttccctcagtgccaatatcactgggccaaaataacaaagaggaaatggaggtcttacctaagcttcctcctccaatagataggaagaaggacagaggatacgctacagctatcagtccctgtcttaagcaggcagcattagaaggagagctcttagccgggtgcagtggctcatgcctataatcccagcactttgggaggccgaggcaggcagatcatgaggtcaggagatccagaccatcctagctaacatggtgaaaccccgtctccactaaaaatacaaaaaattagccaggcatgttggtgggcacctgtagccccagctacttgggaggctgaggcaggagaatggcatgaacccaggaggtggagcttggagctttcagtgacctgagattgcaccactgcactacagcctgggcaacagagcaagactccatctaaaaaaagaagaagaaggagagctcttaacctgctcagtaatgcaaaatcggcaaggcaatcaggtgtatgtttataaaaagataagaaaaaggcattagaagccaaaaccacgtggccaagcaggcagtgggcaggagaaaatgctcagaggcagaaaagctcacagcgacaaagccaacaaggtctgcccaggacggcagcatccctctggcaaaggagcaagggagcagcacagacacaggcaaagcctaaacaagtacaatgtggccacctcccaggacctgcaccactgccctctggctctgtgggcagcccattgcaaaatttcatgtgttacatctcaggctatgattctctgctaagatgtaagtaaaatgtaagaatttgaaaagcatcttttctaataatggccactattgtcatctctctcctatccctgatgtagctttccaaattcaatttaagtaaaacagtaacctttgaagggaaagagattacagagggcccatgaattagttgaagagtaattaaaagctaggcatgtaaaaccacacattacgctttaaagaagaaatttaaacctaattaaatgatatttgttaaattagaaggtaaaaatgttgtgccctgttgggaacaggcccccaaatctggccataaactggccccaaaacaggccataaacaaaatctctgcagcaccatgacatgtttgtgatggccatgatgcccaccttgaaggttgttggtttactggaatgagggcaaggaacacctggcccacccagggcagaaaattccttaaaggcattcccaaaccactaatgatagcatgagcaatctgtgccttaaggacatgttcctgctgcagacagctagccagagcccatccctttgttttggcccatccctttgtttcccataaggaatgctttcagttaatctatgatctatagaaacgatgcttatcactggcttgctgtcaataaatatgggagtaaaactctgttcagggctttcagctcagaaagccataagccccctgatttcccacttcccaccctttatttctgtgtgtgtgtcttgaattcctctagcgcctctgggttatggtctccacaaccacgctggtcttggcagtgcccttctcagaaagtgaaaaagagttgtatgtaagtgtagtgaaaacataagcatgaatcactgtcttaacccactgattagatagtctttgatttgtacttgctaaaagagtcctaaattgagttcctcagctagtgagtcactgttttcaagactgtttgccagattgaagtccataaacttggtcagcccgaaaactcaattacaagatctaagctattctgcctgtggctttaagcacatggttaaagtatattatttaagtctctccttctagatatgctttcagattttctttttaaacttcttgttacttatttcagctttccatattgataattaatgcagtcaattgctcagttatgactgtgatatcatcaggattcctttaagtaaaaggcaattcaaagcggtattgcactcccccatacctaatgctttaacactgtttactgatgggtctggtaaacatggaaaagctgcagtctagtagagaccacataattcaatcactcgatctgagttcactagcactcagagagctaaggttactctgtttatttattaaagaatttttacaaccttaagctcactctggactttccagccttatgtggcaaatgtagccatcaatttatggggtcaagacttacttacagcatgggatatgaggcttacaaatgagactttgataacccaggattttaaatgttgaagaacacgggatatcagagtgaaaaaggtttagggaaaattctgacaagggaaaattctaacctgatatcaataactggaaagacaggttaaaccctgcaaggggatacattgacattttttcttcctcacttgctcttttctgctgtctgaatatgggcatgagggcaagagtcattttagaccaccaagtgaccttgaggatagaagccttatactagaggtggtgggaaagaaaaaacagaaggactcataaagaaaaaaataataaacctcagtattaagatggaaaaattcccccaattggtctataggttgaacttcatctctattaaatttcagctatgtttttgcagaatttgatatgctgatcataaaatttatatgaaaatgcaagagacacagaatagtcaaaactttgaaaagaagaaagttggaggacttacacttgttgattttaaggctttttacaaagctataataatcaagacaatgtgttactgacataatgatagacatattgatcaatatagacaatggatgaatggagtagaattgacagtctagaaataaaaccttatatatatggtcaatttatttctttatgtattctgtcatccagaatacataaagaacaccttcaactcaataacaacaataccaacaagggtgccaagaccaatcaatggaggaaataatagtcttttcaagaaattttgctgagacaactaagtatttatatgcaaaataatgagtttgaatggctaccatatacaaaaattaactcaaatggactatattaggtcagtgcaacagtaattgcagtttaccaccattacttgttttttttttttggtttttttttttgagacagagtcttgctctgtcacccagaccagagtgcagtggcatgatctcagctcactgcaagctccacttcctgagttcacgccattctccttcctcagcctcctgagtagctgggactacaggcatctgggtaatttttttgtatttttagtggagatggagtttcaccatgttagccaggatggtctcaatctcttgacctcgtgatctgcccacctcagcctcccaaagtgctgggattacaggcatgagccaccacgcctggcctaccattacttttaatggcaaaaatgcagttacttttgcaccaccctaatagaactaaatgtaagagctaaaactacaaaactgttagaagaaagcataggagcaaatcttaatgacatgagagttggcaattgttttttagatatgacaccaaaagcatcaaggacaaaagaaaaaaatggataaattggacttcctccaaattaagagaacttttgtcctgcaagcaatactattaagaaagtgaaaagacaagtcacaaaatgggagaacatttttgcacataatatatttaataataggctgacatccagaatacataaatacctacaactcaataccaaaaagacagcccaatttaaaaatgggccaaggatatgaataaacatttctctaaagaagatacaaaaatggtcaatatgcacatgaaaagatgctcaatatcaatatctattaggaaaatacaaattaaaacacaaaatataaaacacaagatatcaatttacactcaccaggatggctgttatcaaaaagacagataacaagtattggcaaggatttggggaaattgtaaccttcatacattgctggtaggaatataaaatttgcagcaggtttggaaaacagtttagcagtttctcaaaaagcctgggcatggtggctcatgcctacaatcccagtgctttagggagctgaggtgagaggattgcttgagcccaggagttggagaccagcctgagtaacacagtgagacctcttttctaccaaaaagaagagagttaaacatagggtaccatataagccagcaatccatctcctagatatgtacccaagaaagttgaaaacatatactgacacaaaaacttacatatgaatcttcatattagccttataataatagccaaaaagtagaaacaacccaaatacccatcaactaattaaaatatggtgtatctatacatattatttggccataaaaggaagtactgatacatgtcataacacaaatgaaccttggaagcactatgatctctgtattagtcagctcttgtattgctataaagaactacctgagactgggtaacttataaagaaaaaggcttaattgagtcacagttccacaggctgcacagggatcatggcccaggagacctcaggaaacacagttatgatggaaggaagagagtgaaggaggaggtgctacatacttttaaaccaccagatcttgtgagaagtcactcactatcatgagaacagcaagggagaagtccacccccatgatccagtcagccccagccaggccccaactccaatattggggattacaattccacatgagatttgggtggggacactaatccaaacaatatcattctgccccagcccctcccaaatcctgtgtccttctcacattggaagatacaatcatcccttctcaacagtttcatttcagtattaactcaaaaatccaaagtctcatctgagacaagacaagtcccttccacctatgagcctataagatcaaaaagaagttagttacttccaagatacaatggaggtacaggcattgggcaaatatatccattccaaaagggaaaaattagccaaaacaaaggggccacaggccccacgcaagtccaaaatcaagcagggaaatcattaaatcttaaagcttcaaaatgatatcctttgactccatgtctcacatccaggccacaccaatgcaaggagtgtgctcccaaggccttgggcagctctaccctgttgctctacagggtatagcccccatggctgctttcacaggctggcattgagtgcctccagcttttccaggtacacagtgcaagctgttagtggatctaccattctagggtctggaagattgtggccctcttctcatagctccagtagacagtgccccagtggggaatctgtatgggggctgcaaccccacatttctcctctgcactgcccaatagaggttctccatgagggctccattcctgtagcatacttctacctggacatccaggtgttttcatacatcctctaaaatctaggtaggggctcccaagccttaactcttgccctctgcacatccgcaggcttaataccacatggaaaccaccaatgcttatggcttgcaccctatgaagcagtagtctgagacatatctgggcccttttggccatggctgggatgcagggaacagtgtcctgaagtggcacagggcagcggggccatgggcctggcccatgaaaccttctttcctcctaggcctccagacctgtgatgggagggtctgcctcgacggtctctagaatgtgtttgaggcatattcctcattgtcttggctattaatatttggctcctctttacttatgcaaatttctacagcctgattaattcctttccaaaaaaatggggttttcttttctactacatggtcaggtcacaaattttccaaacttttacgcttccctttgaaatgtaagttccagttgcaggtcatttctttgatcacaaatataagcatatatttgtagaatcagccaggccacatcttgaatgttttgctgcttagaaactgcttccaccagataccctaaatcattgctatcaggttcaaaattctacatatctctagggcaagggcacaatgcctccaagacctttgctaatgcataagaaaattgacctttgctccagttcccaataagttccccatcttcatctgaggtctccttagcctggacttcattgtccatatcagtatcagcattttcatcacaataatttaactagtctctaagaagttccaaactttcccttatcttcctatcttcttctgagccctccaaactgctccaacctctgcccattacccgggttccaaagctgcttccacattttcggtatctttatagcaatgctccattcctgataccaattttctgtattagtctcttctcgcactcctgtaaagaactacctgagactgggtaatttataaagaaaagaggtttaattgactcacagttccacaagctgtataggaagcatggttcagaaggccacaggaaacttacaatcatggaggaaggcgaagagaaagaaggcacgtcttacgtggctggagtaggaggaagagagtgaagggggaggtgttacacacttttaaacaaccagatcttgtgagaactcactcactatcatgagaacagcaagggagaggtctgcctccatgatccaatcacctcctaccaggctcctcctccaacattggggattatgatttgacatgagatttgggtagggacacaactccaaaccatatcaatcccatttatatgaaatgtccacaatagataaatctatagagacataaaatagattggtgcttgcctagtgctggacgtgacaggagggtgtgagtaaaagaggcaatggagtgataggtacagggtttctttttggggtgatgaaaatattataaaattagattgtggttatagttgtataactcttgaatatcctaaaaatatattgaattttccatttccattttaaatgggtgaatcttatggtatgtgaattatatctcaataaaactgcaaaaaatgcacaatttgcaattgcaaaaatatggaaccagtccaaatgcccatcaatgagtggataaaggaactgtggtatatatatatatatatatatatatatatatatatatatatatatatatatatatacacacacacacacaccatggaatactactcagccataaaagggaataaaacaatggcattctcagcaacctggatggaattggagaccattattctaagtgaaataactcagtaatggaaaaccgaatatcatacattctcactcataagtgggagctaagctatgaggatgcaaaggcataagaatgatataatggactttgggaactcagggaaagggtgagagaggggtgaggaataaaaggctacccattgggtacagtgtacactgttcaagtgatggctgcaccaaaatctcagaaatcaccactaaagaacttatttacataaccaaataccacctgtttctcaaaaacctattgaaattaattaatttttaaaaactgctgaaatcaatagtgaaaggatggactattcaataatgacacagttaattgaatatcatattttaaaaattagatccttacctcacactataacataacaataaattccaggtgaattatagaccaaatatgaaaagcaaaattttaatattttagaagacaatttttatgaccttaagttagaaaatgatttttaaaaacaggatgcaaaaacactaatcataaagagatattttaggccaagcatggtggctcacacctgtaatcctagtactttgggaagctgaggcaggtggatcacttgaggtcaggagttcaagacaagcctggccaatagggtgaaacatgtctctactaaaaatacaaaaattagctggaaatcgctcgaacccaggaggcagaggttgcagtgagctgagattgtgccactgcactccagcctgggtgacagagagagactccacctcaaaaaaataaataaataaaaataaagagagattttaataaggtgcattaaaataaaaaactatccatcaaagacaccatgaataaagttaaaataggccacaatgagaatatatttgccatgaattttttctttttttttgagatggagtcttgctctgtcacccaggctggagtgcagtggtgcaatctcggcttactgcaaacttcacctcccaggttcaagcaattctcctgcctcagcctcctgagtagctgggattacaggtgtgtgccaccatgcctggctaatttttgtattttttgtagacacggggtttcaccatgttggtcaggctgagctcaaacccctgacctcgtgatccaccttcctcagcctcccaaagtgctgggattacaggcatgagccaccgtgcctggcctaccatgaatatttttttaaaggtagcatccagaattaataatcttctccaacaaatttcattagtagtcagggaactgcaaattaaaatcaaagtaaaatactactttccactcattagactaaaatccattcaagtctgataatacctagtactgagttggagtaatagaaactgctaatgggacagttagttggtcatcactttggagagaaattagtcagtatctagtaaaagttagtgatacaccttccattttcatctgttctgtgctgctaccaaagaatacctgagactaggtaatttataaataatagaaatgtatttctaatggttctagaggctgagaagtccaagattgaagggccagcctctgcagagagccttcttgctgtgtcatgccatggcagaagggcaaagagagggcaagagagagcaaaagcaaattcacagcatcaatcccttttataatcagcattactctattaatgagggcaagaccctcatggcctaatcacctctaaaaggtcacacctcttaatactattgcaatggtaattaagtttctaatacatactttttgggagacattttcaaactatagcacctaccctatagcccaacatttctactcctaggagtatgccctagagaaattctgcataaatatctaaagagaggccattgttgcattgttaggtactggaaaattggaatcaattactatgtctaccagcagcagaagatggctttttaaaagttttggtttattcatgaaatggaatattgcataaagtatgctccatctcaccagatgaaaacatttttcactaggactatttcaaaagtagtcttatcactgggcttctctattatgcataaaaattttaagtgaacatgttctttgacctagtactcctacttttaggaatttgcccaaaagggacaattatactactgggataaatctttgaatcataaagtaagttgtaaatggtacaagcagtatgtcttatttttatttaaagcacattaacaatattacacatatagtaaaaaataaataaataaaacatgtgaataataaacacccaatttagaacaagtgttgacagtggagagggaaagagagagaaagaaggagaaatggggagtgggagcgggtacacaaggaaattttagttgcagctccaaatttttactttttacacaatgaagcgaatatggcaaaataagatttgttaaagttgggcagcaggtacacagatattctatcattatcctttgaatatttctgtagatttaagttgtccattaaaaaaataaaatacacacataatttttaagattagttttttctatttcctggccttcgcatgcactgttaactttacctggaattctttatgcagtaattaagagcaaaggtgtagagcaagactgcttgagcttggatcccagcactgagttgatttagggagaataacttaatctcttaatcccaagagaaaatatgatataatagttttgagctcataaagttttcataagcattaaatgtgacctatatatgtaaagcaatctaacagtgcctatagtatttataagtgtctgcattaccaaattcatcattatcatggcatgtcatgtcaccatccactacattaccatcactgtcaccatcatcatcatcaccaccaccatcatcattaactccctttgtctagtcaattcatatttgttcttcgtattttagatacctgttaaaatattttttcaaagatgtctactctgattcttcagtacaaatttgatttaataagatcctatcattttgtccaaatacttataaaaatttgtagttctatatttaatgtgttttgtttgtttaacatctctctcctacattgtgttaagttttttaaagagaaggtaagggttaaagagagacatagagagagaaagagagacagagagagagagagagcggttctacagcaatacaggtatattagaaaaacctgcaaaggtggggaccagcttaatgccagagccccccactgcttataggctggggtacttataggtctgggggtacttataggcctgggtgggtggggtctgagcagtatggcttgctgcccaagaagatgttgataagacgttcccatgatgaggcagtttggtccttgcttccatagagtgtgatgcttcttgcactttttcccagcagaatgtggtagggatgttccttcaggtgggcctttgcctggcagggtatgataaggatgttcctgtgccttggaatcaggtagttagacaggatgtttctcacagcctgaacccccatggaatgtttcactttgaccagggtctgcgaaatagcagggggcttacaaaatggtgtagtttggactaacaccttggaacacaaaagtttcttggggccaaggctggcgtattagtctgttttcatgctgctagtaaagacatacctgagactgggtaatttataaagagaaaagaggtttaatggactcacaattccacatggctggaggcctcacaatcatgagggaggcaaaggaggagcaaaggcacgtcttacatggtggtaggcaagagaacgtgtgcaggggaactgccctttataaaaccatcagatcttgtgatacttattcactatcaaaagaacagcacgggaaaaatctgcctccatgattcaattacctcccaccagattcctcccatgacatgtggtaattatgggaactacaattcaagatgaaatttgggtggggacacagtcaaaccatatcagctgggtatgttttattcacctttttatacccattgtcatgtcttctggacaaacaatggatgtaaaatggtatagactcctgagtactcatttgttgaatgacaaatctatgaaccatttgaccagtatgcagcagccattaaaattatgtttatgaataatttacagcatggaaaaatttggggttgctagtagaaaaacaaaaaggtacaaaaggatatatataataagcctacaatgccatataaacaatactaacagcaaaaacaaacctataaattgggggaagatggggcagatagaagtaacctaaaatactaacatgttgttttggggtcatgaaattataaatgattatgcaccccttaatttttactttctatgtttgatttttctatggtaaatgcatttttattgaggtggaattcacataacatgaaatgaaaaatttagtggcatttattatattcacaatattgtacaaccactagctctacttccaaaacattttcatcactccaaaataaaaccttgtacccattaagcagttactccccattatttcctctcttagctcctagcaaccaccaacctgctttctgtctctagggatttatttattctggatattccataaaaatggaggcacaatatgtaccttttatgtctggcttctttcaccaagcatgtttttgaggctaatccacattgcagcatgtatcagtacttcatttctttttatgaataactgtatacagaccacaatttgttatccattttttggtttatggacatttgggttgtttccatctctcaactattgtgaatagtgctgctatgtatatttgtgtacaagaatttggttacctattttcaattcttttatgtatatatctaagatgaaattgcagggttatatgctaatcctatgtttagcatttttttttaggaaccattaaactgttttccaaatctgatgccccattttatattcctactagcaatgtaagcaagttccaatttctccatatcctcaacaacacttgttattttctatttttgttatagccattctaatgagtgtaaagtgatatatcattgtggttttctttgcattttccttatgaacattgatgttgagtaccttttcatgtactttttggtcatttatatatcatctttggagaaatgcctcttcgtgtatgttttgcccattttaaaactagattgtctttgttgttgacatgcatgcattctttaaatattctgcatactaggcccttatcagatatatgatttgcaaatgttttttctcattttactggctgtcttttcactttattgataatgtcctttgatgcccaaaagttgtttattttgatgaagcatatttatcaatttatttcttttattgctcatgcttttgatgtcacctctaagaatttataaccaaatcagaggtaatgaaggtttacccctctattttcttctaagagttttatagttttgactcatttacttaggtcgctgattcatttttagttaatttttgcatatgatgtgaggaagaggtccaactttactcatttgcatgtggatattcagctgtgccagcaccatttgtgaagagtctatcatctcctcatttaataatagtattgacacctttgttgaaagtcaattgataataaatgtatgagtttatttctggaatctaaattctattccattgatctacatgtctatccttgtatcagtatcacactatcttgattactgtagatttgtagtaagttttgaaactagaaagtgtgagtactgcaatattcttctttttcttttttaaagattgtcagggcctcttgcaatttaatagggatatgaggattgacttttctattctacaaaattaaaattttgttagagattgcattgacactgtaggtagctttcagtaacattgccatctcaacaattttaagtattctaatacatgaatatgagctttctttctctttatttaggtcttctttaatttctttcagcagtgttttgtagttttggggtacaagtctttcacctttaaattttggtgaaatttattcctaggtattgcatttttttatgctattgtaaataaaattattttctcaatttcctgttggatgttcattgcaggtgtatagaaactcaactgattctttgtgttgatcttatgctgagaccagctcagttggggagaccctaacctagaagcactagaggaattaaagacacaaacacagaaatatagaggtgtaaagtgggaaatcaggcgtctcacagccttcagagctgagagcttcaaacagagatttacccacatatttattaacagcaagccagtcattagcattgtttctatagatattagattaactaaaagtatcccttatgggaaacgaagggaagggctgaaataaagggatgggttgggctagttatctgcagcaggagcatgtccttaagtcatagatcactcatgctattgtttgtggtttaagaatgcctttaagcggttttctgccctgtgtgggacaggtgttccttgccctcattccggtaagcccacaaccttccagcgtgggcattatggccatcatgaacatgtcacggtgctgcagcggtttttatggccagttttggggccagtttatggccagattttggggggcctgttcccaacaatcttataccttgcaattttgctgaatttgcttgttaactttgatagtttttttgaggattatttgggattttctacatatcatgtcatctgtgaataaagatagttttgcttctttctttctcatttggatgccttttatttccttttcttgcctaatttccctggctagaacttccagtatgatgttgaataaccatggtgaaatgggcattcttgtctttttcctgatgttagagagaaatttttcagtctttaaccattgagtataatgttagctgtgggttttttacaaatatcttttatcatgttgaggaagttccttcctactcctacttcttggagtgtttttgatataaagggtatttaatttgtcaaatgctttttctgtgtcagttgagattatcatgtgagattttttttccttcattctattagtgttgatgttacattggttgattttttatgttgtactacatttgcattctttatataaatttcacttggtcatggtgtataacccttttaatatgccattggatttagtttgctagtattttgtttagagtttttgcatctatattcataagcaatatcagtccacaggttttttgtggtttatttgtctggctttgctataatggtaatgctgtcttcttagaatgaatgagggagtgttttctcctctttcattttttaaacgtttgagaaggagtgatattaatttttctttaaatgtttggtagaacttaccagtgaagccgtctggttcttaacatttttctgtgttgggaggtttctgattaccaatttgatctctttaatttttacagatcttttcagattttctatttcttcttgagtaactttttagcaatttatgtattttagaaatttgttcatttaatctaggttatttaatttattggtgtgcattttttcatagtattatcttataatcttttaatttttgtaaagttgataatgtccccaccttacctgatcttagttatttgtgtcttctctgtattctttttgtcttcttcttctgtcttagcatagctaaaggtttgtcaactttgttgatcttttaaagagtcaacttttgctttcagcatgcattactttttaaatagaaatatatacacctaagttgcattacaaaggagttgtcctccacacacttattctttcccaccatcagaggtttatggtccccgcaaaagtcaccatcagttgggctcaactccaatcagtcatggtaggtcagggtccatctcattgtctccatcactcatgcccacccagggtaagtctaatcatgttcaccaatcagaacctctgccacatcagctctgtgggtttcctctcatgccatctgtaccaacaatgagcacagtctgggtttcctgatgttttctatagcatggtgcccctccctgggacacctcagaagccacaatgatattcattaaacttcttcctgcaagtactccctctattgctccttctactcaccaagcttagtgtcagggaatatgctggtggggagtatgaatcttagcttctcactcccagactcggctcccaacctgctgttgccaagtcttggggacatctataaatgccttctaaatacctgtcttggcctatccccagccacagattcctccctagagcaggctacctctgaggcatctatactgagatcttaatcacagagacatttaaaacatctaggctacaaaagaattcctactatagggttcaaatgaatttctttccgtcacttgagacagctttttagcaagtacatgtattaaagattctgatttccccttttttctcctacagtttgtttggcctaaaggtatgacatctaatctgctgcatttacactctaagtcaaaattaccattttgttcttttaatttctatttctaatcatacattcttgtctactcctggttcatctggagacaaagttgaacttagaagatggaggagaaattcttatctgccctctgctagttgacacttcctttccaagaatcatttgcagttgctgggctttcttgctgtgactctatgccctgttgtgttactttttcatttgtgacaaaaacagtggtaatagtttgcttcatttttattatgaagacttgaccaggataggtaggaacataattactgctttttctgtgggcatcatattggtccagatcatgtttaaccagaattgaagatgtaaaatcctagaactcactaatctattttagtaggtcacaggaagcatgcaaaccataaaaaccgcaatgaaccaaaagcatctgtgttgacaagaggcaagaatttctctattttctaaaggcactaactgaacaaatctattgcccattacttaggaaattgctaagggcatcgttaaagtacttcaggctgttgaaaaaccttttctgtcttcttgccccaccaccaattctctctagctatgctttctctcacatgttcttgccatccatggagtggcagagaggttctgagtacaactctaactttcagtttcaatggcctaatccccaactcaactgctgaccttgagtgtaaaaataaacaagatcttaaacatcttagggccagcattctgggtcttcttttgttatttggggagcataaactattctcatatcattggcttgcagaaaaattgagcttctcctcttccttgccccatgtcaccttgaggtgaccacagccctgccttctatgtaatcctgcttggtcagcaggcacatcagagctcagtggcttgtgacatactttccttcaagcctgctcgaagggccatactcatcattgagactgggaaccttagaaaccatgaacccagtgccaatgggtagatacagaattctcaaactcatgaaaaaacatcctttttaactctctccgtgtgcataaagaattctaagatgtactgatcaagattcccaattttctaactatctattaatatatggacgaggtaagaagaaagttgcaagaaaaaaatttgtttgacttgacggttgtgtggttatttgccacactcccccagatccactctgagtcccaggatgctgattttaggggctacattgcctagactgtccattattccctcttcccatctggttcagtcactgggaagcactggtaggaggtcagagtgggagaaggaggttaggatactttctgcccctgctgtcctactgctttgctgaacttctagcagtggctgagccatcaacctgcagctctcaattccagctgtctgtagcactcaagtggtattgtttattcttttgatccttctagctgttaaggaagaaaaaaataattttttcctcaatgctcataagttcttggaatggacccctgtaacaaaagacagattaacacgagaaaagtttattaacgtacatattttatacgtacataggagctatccagggaatgaataattcttaaaaaggtgactttgaattccagctcatatagcatcttcaacaaagttcagtaacattttagagatatgacaagacaaagaaaatgaactttgagcctctagggacagtgacttgtaggaaggcaaaaggaataaatggaggtaaaggctggttagtaatacttgttaatgaagattcctctggtgccatctccaggtccacaaggatttaaatttgtcttcagtggtgaacctttgttcaccctggcagaaggtgtggaggggggtgcagatccgttttgtctttgtaagtctatatcctgcttttagacaaataaagggagggaaaagagctttccttcatctgcttcttaattgccttcagctcaacaatccttatgcaaaagaggtacattttagggtgtcaaattctggtctcccacaaagcatagggatgacagaccacctcaccatccctgttgcttcttttaagcctgctcacccctccaaaaatattttcattctatactgtctcttcaaaatctcagcggagggtgccctctgttatcctgccctctgtgtcagtataagccaaaggtttgaatcctggctctgcaactatctacctctgtgcctctccttgtttatgaaattacagggctggagacaaagatcacaatgtgaagacaaaattggagagcggtcctaatcagccagagcaaaatttctggctcttgctcttccccatcctgggttgaatcataggaacaggtggcaagatgccagggtcaggagattccagaagtggcagcaagctcagtgttaccaggtcagggatgacctgtcttattattgaaatctcagagatatgctccaattccggcccagagacacattgagagacaactggggaacttgctatgttcctgaacaggcaatgagctgtcttccaagaaaaaacctgagacccttcaagtctcaggtcttacttagcacatataccaggtcttacacaggacacatggttacaactgactgaaatctgggctgggtgtaggagctcacacctgtaatcccagcccttcaggaggctgaggcaggcagattgcctgagcccaggagttcgagaccagcccgggcaacatgacaaaaccccatctctacaaaaaatagtcaggcatggtggcatgcacctgtagtctcagctacttgggaggctgagatgagaggattgcttgaggttgagactgcagtgaagcatgatcatgccaccgcactccagcctaggcaacagagcaagatcttgtcgcaaaagaaagcaaaaacacaacataacacaacaacaacaacaacaacaacaacagcaaaaaagccaacttcttgaaatctggaaaggacacctggactgccctgagcatttgattgttgttggctctagcagtggatgcatccttcaacctctggcactctgcagggctcagactgttctgttctgtttgttacctgtggagtgcctgccagaccctgctctagctgctttaggtccatttaccctcatagacccccagtcttgttattcatatttcatatttgggaaatggaaacttagaaacttgccaagtccacagcatgagatcctgcctccggtgtctgctggattccagaaagtgccaggggccaacttagatgacaccatgttctctgcacaatcttaggaatgctcctagtctgatgtccccattgcaaaatttacattatcttttaacaaaacgtctttccaaggaggggcatttaaaataactgaggttcttcttgctaaggacgttcctgacacaagagataatttagcatttccttttcattaaaaagtttgaaatcctgtaatttgtgataatgtggatgaacctagaggatgttaagtgaaataagccacacacagatagacaaataccacgtgatctcactcttatgtggaatttttttttaaataagttgcttagccgggcatgatggcacacacctgtaatcctagctactcaggaggctgaggtgggaggatggcttgaactcagaaggtggaggtagcagtgagctgagactgtgccagtgcactccggtctgggtgacagaatgaaacccaatttaaaaaaaaaaaaaaagttgctatcttagaaaaagacagtagagcagtggttaccagagactggggaggaaagagaggaggtgagaatgggcagcagttgatcaacgggtacaaagttaccatgagataggagaaacaagtgctggtgctctgctccaagtagggtgacggtagttaataatgaattctgtatatataaatagctagaagagagggttttcaatatcattattatttcaaaagaaatgataaatgtttcagaggatggatatgtaattaccctgatttgatcattgcacaatgtatacatgtagcaaaacatcacattgtgtcccataaatatatacaattattatgtgaattaaataaaaaaaaattttaaagtcttatctaaatgaaatttctaaccagattctgaatccatgataccactgaaaccagcacacatgatcgcagtaaaacctcattatacttcctccactatcaccaataccctttattctctggaacatgaaacattctgttgtgctcatatcatgcaaattatcactagtaggagagcagagagtggaaatgttccaggtataaagacccacaagataaagaagctcagagtcgttagaaacaggagcagatgtacagggtttgcctgactcacactcaaggttgcataagcaagatttcaaaattaatcctattctggagacctcaacccaatgtacaatgttcctgactggaaaagaagaactatatttttctgattttttttttcaaatctttaccattagttgccctgtatctccgccttcactttctgcaggaaactttatttcctacttctgcatgccaagtttctacctctagatctgtttggttcagttgctgagaagcctgacataccaggactgcctgagacaagccacaagctggtgagttgtaggcattttttccattactttctgattcataggctcaacgcacctcaaagctggaaatgccgggtctgggtacaccctggggaactgcaaagcctgcacacttgggggaaatgatcaagatgagaggcaggggtggggatggcatgtgcaccaggagatgttagagaaaccctgaggaagagcagcgtgcagcaggtgatgggggagagtgggcagcaagcgaggccaggacagccactctgctcagtcaccagtccacacacccaggggctcactctgcccctctgagcacccaaggacgttaaagagctggaactgttagtctaaatataggaccatccaagctctgaaccaaaatgtgtcccttgcctcaactcaggagatccacagaggcagaagtaaggaatttattttctgaaagatagatttctatcagttctgggtgacatgttctgacacttgaaatgacacctaggacagcacatttcaggcatcttgctcattgttcactgtagtagaagctacatgctagccagttgtaaaaatgaaattaagtaatgtgtgcacagcatttaacatagcatctgagcttcaggagcactcaattaatgaccacagttgtgattctttaggcagatgcatttttttccaactttgatcagaggtcttatttagcttctccagatttcaagaatctggctcagtgatatgaaatacaagacttgtgaaaagtgtcaattgcaagagaaatggaaggataaagtatacaggtgggtggaaaagaaattcacagtcactgccagaaaaaaaattcttgagaatcaagtcctgatgatgttagggcttatagttcttattataaagagttttatgtactcattcagtgaacatttattggtgcctcctttagccaggtactatcataagagctgaaaataaaagcataatccagtccttgatcttgaggaacatgctgtgtgtagcagataacataataagtgcttatctagatgcatgcagtgttatgtgataagagtaatatgacagaggatacagattaggcttcacagagaagggggatttgagcaggaggtattgaagggtgaatagaagctcaccaatcattttgggcagaggggcaaggacctgcaaaaccactgaagcatgaaggaaatggtgagtttagggaaaatgaagagaagatggctgtgactgaagcacaggatttgggattggagaagggactggaggtgaggctgagaagaggcaaactcagaaaagatgttgtgctgggcagtctggacattatctttgaagcccaccacatataagtcatagggctactggaggttttaagctaaaagtgactattcaatttcaacttaagagaagataggttgagagggaacatggcttgagatgagccatgagcaaaggaaagactacaacaaagccaggagtgaggagtgtgtgaagcaagaaagtgacagttgaaagcagtgcagaggggatgaatctgagaggcatctatgaggtggaactcaaatgacatgataataatacagggcatttctctgtgtcagatgctgtcctaagtccttactccattgatcttcacagcaactcagcatagttaatattttatgcataaagaaatcggcacttgaaggagtaattggccccagattacactgcctataaggattcaaatccaggtttgtttggctccaaaaactggctcctaattttcagaaggagaagcgacccagggcaatgcccaattttgcttcttaggcaatggaggaatccacaatcggaaggagttttcagcagtgccccatttggggtgggttgaatttgaggtccctgcatgatacccactttgctcacttcagtgcctaaaactgagtatggttcatagtaggtgttcaataagtgttgatgcagtgaatacatgcatggggagatatgcatcaggcaatgggaaattcaactctaaggcttaggggaaagctggagcttgaagacagagctttagaaaacagtagcatagaagggagtaggaaccatgagtttagacaatacaattcaggaagaactttgtagcaaggataaagaggcaaaaaattaaagaggtgagagctaagtgtggtgcctggggaatcttaaggtgtgggcacggggaggagatgccagcaaagaacatgaataaaaagcggtagcacagcccctcccatctggaagccaaaaagaattgtaaatggaggaagttagcagaaggatcaaatacttgaagagggtggaattggaataaaaccagggcatttgaaaaattgggttgtcactgcaatcttaacaagagaagttttggcaggatgatggaggcagaaagctgagagaatcatcagttagaacgtttttgacttcagagaacagaaaatgcagttcataatggctttaaaacaggggcttgtttttctcccagcaatttgagaggccaaggcgggtgcatcaggaggtcaagagaccgagaccatcctggccaacatggtgaatccccatctctactaaaaatacaaaaattagcggggcatggtggtgcacgcctatagtcccatctactcaggaggctgaggcaggagaatcacttgaacccaggaggtggaggttgcagtgagctgagatcatggccactgcactatagcctggagacacagcgagactccgtctccaaaaaaaaaaaaaaagaaggcagaaggtgaatagttcaagggtgggtttaggactcagtgataataggattctgcctggcttctcatggttctctaggtcttccattcatggcaccatgccctcactaggcatgctgccagagcaggaggggcaggtggagggttctcttgtgtctgtcttatcagggaagaagagctttctcagaagcccccagcagactcccttttcatattatggtccagcaatgagtcacagacctatgcaccacctgcaaaggagccagagaaaacaaacgcccagcgcttttagcctgaaaatgagaatctggtttgctggggaagataaagggtgtcggaaaatggctgttgggtaaatcattgatgtctgccactaggaatgaaaggcaaatcaggaactggcacacatgctttcagggagatggctgcaagggagagggcaaagactgggaagttgcttatgtggtgccagactatttggaagatcatggattgcggtgtttgtgttgtgtggtcatcattttgttctttgtttacagaacagagaaagtggattgaacaaggacgcatttccccagtacatccacaacatgctgtccacatctcgttctcggtttatcagaaataccaacgagagcggtgaagaagtcaccaccttttttgattatgattacggtgctccctgtcataaatttgacgtgaagcaaattggggcccaactcctgcctccgctctactcgctggtgttcatctttggttttgtgggcaacatgctggtcgtcctcatcttaataaactgcaaaaagctgaagtgcttgactgacatttacctgctcaacctggccatctctgatctgctttttcttattactctcccattgtgggctcactctgctgcaaatgagtgggtctttgggaatgcaatgtgcaaattattcacagggctgtatcacatcggttattttggcggaatcttcttcatcatcctcctgacaatcgatagatacctggctattgtccatgctgtgtttgctttaaaagccaggacggtcacctttggggtggtgacaagtgtgatcacctggttggtggctgtgtttgcttctgtcccaggaatcatctttactaaatgccagaaagaagattctgtttatgtctgtggcccttattttccacgaggatggaataatttccacacaataatgaggaacattttggggctggtcctgccgctgctcatcatggtcatctgctactcgggaatcctgaaaaccctgcttcggtgtcgaaacgagaagaagaggcatagggcagtgagagtcatcttcaccatcatgattgtttactttctcttctggactccctataacattgtcattctcctgaacaccttccaggaattcttcggcctgagtaactgtgaaagcaccagtcaactggaccaagccacgcaggtgacagagactcttgggatgactcactgctgcatcaatcccatcatctatgccttcgttggggagaagttcagaaggtatctctcggtgttcttccgaaagcacatcaccaagcgcttctgcaaacaatgtccagttttctacagggagacagtggatggagtgacttcaacaaacacgccttccactggggagcaggaagtctcggctggtttataaaacgaggagcagtttgattgttgtttataaagggagataacaatctgtatataacaacaaacttcaagggtttgttgaacaatagaaacctgtaaagcaggtgcccaggaacctcagggctgtgtgtactaatacagactatgtcacccaatgcatatccaacatgtgctcagggaataatccagaaaaactgtgggtagagactttgactctccagaaagctcatctcagctcctgaaaaatgcctcattaccttgtgctaatcctctttttctagtcttcataatttcttcactcaatctctgattctgtcaatgtcttgaaatcaagggccagctggaggtgaagaagagaatgtgacaggcacagatgaatgggagtgagggatagtggggtcagggctgagaggagaaggagggagacatgagcatggctgagcctggacaaagacaaaggtgagcaaagggctcacgcattcagccaggagatgatactggtccttagccccatctgccacgtgtatttaaccttgaagggttcaccaggtcagggagagtttgggaactgcaataacctgggagttttggtggagtccgatgattctcttttgcataagtgcatgacatatttttgctttattacagtttatctatggcacccatgcaccttacatttgaaatctatgaaatatcatgctccattgttcagatgcttcttaggccacatccccctgtctaaaaattcagaaaatttttgtttataaaagatgcattatctatgatatgctaatatatgtatatgcaatatatataggctcttgcttgatctctccaggaggtagtgattatgagaagggggtggagaatgatgagttccttcaccaggagcaaaggacggggatcgtgtggaaccactgcagaactatttccggaatcaactaagtggagagagccaggaaggctgcatcagaacccagtaaagcttcttgtctggatctgagctggtttgttttgtgcttgcttttccctgccttgccactcccctcactcttctcttttccccacagcctttttcacatagctcttggctgtaggattgccccactccaaaaaccagtgtgtggaggtccaggagtgagaccaggaaagaatgtgaaagtgactacacaaggactcctcgatggtcgtggaaaaggaaagtcaattggcagagcccctgaagccagtcttcaggacaaagaaggagcctagagacagaaatgacagatctctgctttggaaatcacacgtctggcttcacagatgtgtgattcacagtgtgaatcttggtgtctacgttaccaggcaggaaggctgagaggagagagactccagctgggttggaaaacagtattttccaaactaccttccagttcctcatttttgaatacaggcatagagttcagactttttttaaatagtaaaaataaaattaaagctgaaaactgcaacttgtaaatgtggtaaagagttagtttgagttactatcatgtcaaacgtgaaaatgctgtattagtcacagagataattctagctttgagcttaagaattttgagcaggtggtatgtttgggagactgctgagtcaacccaatagttgttgattggcaggagttggaagtgtgtgatctgtgggcacattagcctatgtgcatgcagcatctaagtaatgatgtcgtttgaatcacagtatacgctccatcgctgtcatctcagctggatctccattctctcaggcttgctgccaaaagccttttgtgttttgttttgtatcattatgaagtcatgcgtttaatcacattcgagtgtttcagtgcttcgcagatgtccttgatgctcatattgttccctattttgccagtgggaactcctaaatcaaattggcttctaatcaaagcttttaaaccctattggtaaagaatggaaggtggagaagctccctgaagtaagcaaagactttcctcttagtcgagccaagttaagaatgttcttatgttgcccagtgtgtttctgatctgatgcaagcaagaaacactgggcttctagaaccaggcaacttgggaactagactcccaagctggactatggctctactttcaggccacatggctaaagaaggtttcagaaagaagtggggacagagcagaactttcaccttcatatatttgtatgatcctaatgaatgcataaaatgttaagttgatggtgatgaaatgtaaatactgtttttaacaactatgatttggaaaataaatcaatgctataactatgttgataaaagatttaaaaacaactggctgtttttttacactgtggtgtggaagattgtgttgtgttcacaacttttcacttcttcccctgtgtgattacacacacctgcccttgtggtgtgacttgcagtgcgccctacaggccacacaaccccatgccctccaccactggctctgctgctggaatgtgagcagaagtgacatctgcctcatccaagcagagcctcttgctcagccacaggaaggcccattccagatcacacccgtcagcccgtgcgccctggtgaatgagaagacacagggagctgcagccacatataacatgagcaagaagtctgtgtttgctgtgataagccactgagttttaggggttgtttgttaagaagcacaaaaaccgattaagacatgtggtatatagtgacttcatatatagaatctggaaaactatccatttattttcaatcatggaattcaatatgacaagcatcccggagggtctacctatgccagactgggttggaaacagaaagacagatgttaatgccagtgtcctttacacctccaagtccagggccagctgtggagtgggaggggtagagaaggtcctgtgcacagtcacagtgcgctgtgcagagcaggaacagaggcatctgtgaaaagtgctgagagcctggaggacagagtgactaatgcaatgacagtcttgcatcataggaataacagccacagcaggattttattgctgccaaagaaactgccatttaaaaattgccagccatccgggaggctgaggcaggagaatggcatgaatccaggaggcggagcttgcagtgagccgagatcgggccactgcactccagcctgggcaacagagccagactccatctcaaaaaaaaaaaaaaatgccagccatctctctttctaaagtggaatcctcaagtctcgtttattctggggacatttgagtaggctgttcgagttaagcaggtggaagttgatgatccctcatcatcattctgagggatgagtgtctgaagactttttggtaaggaagggtcttggcatagcccaccccatgccacctcccttgatctgtgatatccccagcagctggggaggttggagcattttgcaaagaggccccgaagcctccagaaagtaaaccttcaagagcccatccttccttcctcttttgtttttgctcattatgaaaacttccctgacaaattgaaaaggcttcaggtgagattagcccacaggaaaaaccaccaagggccacccagaggggccacactgtgacagaaggagtatgggctggtgagctgacctctggaagacagtgcatgaattgaggagaagagattggttccaggcatgggaggaatgaggctggaaatttcttcagacattgccacttcggcactctgtgtgtgtgtgtgtgtgtgtgtgtgtgtgtgtgtgtgtgtgtgtgtgtgtgtaaacagagtcctgtaatgcaaggtccggccttggcagccccagcctggagccacagtgagatgtgagctgagggttatgctgggaaaaacctctccctcccagcacctgaaaggctctgcaggcccagcagctcagcaagcaagggtaagggcatggactaacatcttatttcatactatcccttataacacatcctaatgtaatcagctcacaatatgaaattatttcatttctctccagtcattgtttcaatggggccttagggttgactggattctggaggtccctgcctagaggagggggtgcattctgtccctatgtcccctcctgctccatcctccacagcacgtgcctagtggtctaccttgtggggaattcttgtacctccctcttctaggcatggactagcattgagaagtgggagaggagtgttaggaaaaagggcaaatatagacataccttgtcttattgtgctttacagatattgtttttgttgttgttgttgttgtttacaaattgaaggtttgtggcaaccctgcctcgagcaagtctattggtgctgtttttccaacagcatgtgcttgttttacatctctgtgtcacattttggtaattctcccaatatttcaaactttgtcattatttctatatctgttatggtaatctgtgatcagtgatctttgatgtcactattgtagttgttttggggcaccatgaagtgcacccatgtaagatggcaaacaatcaataaatgttgtgtgtgttctgactgctccatggactgcctgttcctgagacacaataatgtatatataacaattatatatatatatatttataacaattatatatatatatattttttttttttttttgaggcagagtcgcactctgattgcccaggctggagtgcaatgatgtgatttcagctcactgcaacctctgcctccccaggctcaggtgattctcccacttcagcctcccaagctgggactacaggtgtgcaccatcacacccggctaattttttttttgtatttttaggagagacagggttttgccatgttgcccaggctggccttaaactcctagactcaaacaatccacctgcctcagcttcccaaagggctgggattacaggcatgagccactgtgcccagcccaagacacaataatattgaaattaagccaattaataaccctacaatggcctctaagtgttcaagtgaagggaaaagtcccacgtctctcactttaaatcaaaatctagaaatgattaagcttagtaaggaggacatattgaaagtcaaggccaaaagctcacctctgcaccagttagccaaattgcgacttcacaggaaaagttcttgaaggatatttaagctctactccagggaacatgcaaatgaagagaaaacaaagcagccatattgctaatatggagaaagtttgagtggtctggagaaaagatccaaccagccacaacatttccttaagtcaaagcctaatccagagcaagactctaactctcttcaatgctatgaaggcggagagaggtgaggaagctgcagaagaaaagtttgaagctagcggaggttggtttgtgaggtttaatgaaagacaacatctccataacataaaaatgcaagatgaagcagcaagtgcaaagggagaagctgtggcaagttatccagaaaatctagataagataattgatgaaagtgtctacacgaaacaacagattttcagtgtagacaaaacagtcttatgttggaagaagatgccatccaggactttcacagctagagaggagatgtcaaggcaagctgcaaagctccacaggacaggctgactctctttttagaggtgaatgcagctgatgactttaagttgaagtaaatgttcatttactattttgtaaatcctggtgtcattaagaattatgcgaaatctactctatctgtgctccataaatggaacaataaagcctggatgacaacacatctgtttacagcatggtttactgaatatttcaagcccactattgagaactattgctcagaaaaaaagattcctttcaaaatattactgctctgcaccatgtcgatcaagagctgtgttggagatgtacgagaatattcatgttgttttcatccctgctaacacaaacatccattctgcagtccatggaccaagactttcaagtcttattaagaaatatatttcataaggctattaagaaatagctatatatatatatatatatagccttatatagtttatatagctaccattgatagtgattccattgatggatctgagcaaagcaaattgaaaagcttctggaaagtagtcattattctagatgccattaggaacatttgtaattcatgggaggaggtcaaaataccaacattaacaggagtgtgaaagacattgattccaacccccatagatgactttcaggggttcacgtcttcagtggaggaagttgctgtagatgtggtggaaacagcaagagaactagaactagaagtggagcctgaagttgtgactgaattgccgcactctcatgatcaaacttgaacagatgaagagttgcttcttacatatgagcagtgaaagtggtctcttgagatggaatctcctcctggtgaagatgctgtgaacacggttaaaatgacaacaatcgatttagaatattacataaatttagttaataaagcagtggcagggtttgagaggattgactccaattttgaaagaagtgggtaaaatgctatcaaatagcatcacatggtatggagaaatcttttgtgaagggaagagtcgaccaaggtggcaaattgcattgtcatcttattttaagaaattgccacagccacccccagctttagcaaccaccaccctgatcagtaagcagccatcaacatcaaaacaagaccgccatcctcttcagcaaaaacactatgacttgctgaaggctcagatgatggttagcatttttagcaatacaatatttttaattaaggtatgcacattggtttttctgacataatactattgcatacttaatagactacagtataggataaacacaacttttatatgcactgggaaaccaaaaaggttatttttgagatatttgctttactgtggtggtctgaagctgaactcacaatctcaccaaggtgtgcctgaacctctttagctaactggccactgccacagtccactctgtgttggtcaagatgccccagagtggcaggcacactgtgtggtcacatccaagggcctagatatggtgggggctccaaatggatctagatatgtgagatctctctttgatttgacttcttccaacccaccattttctgggtgctgggctcatctcacccagaaagtaggacccaatgtgacagttcctgcccagttccctcctgtggtagccacttgacccaggggcactcttgatccttgcagcctcacttacacaccctatctctacccctattaactctctccaatccccactccccctgctcagcttgtctgctgcccagtgggggccccacccatgctggcctctccttttgcaagtccccattcctcatatggtttcttcagagcccctttctttggctttgaggagagatgccctcactcgcttccccaccaatcctgcccacttctacaatccattcattatcctaattgcctccgtatacagactggagtgagaggagttgatgtgatgggtgtggatacagggctggtgctgtcatcttctagtaagccctgggagaggtgtctgagcccaggtgtcagtggttttctttggaactgtgagtgcataacacttctttgccttcagccttaggccatagttgctagttctgggacaaccagaaaagccctacataatctcgtgttatgtgcagagctgagtatagagctccaggtatgatctgactcacttaagatcacagtgagtctattgtattgttgaactgttagcttagacatctgttactgtacctacatggcactagcctcacgcctagacaccgatctgaaagaaatcccctaaatgcatagagaagacttctcagctgagctaaggggctcccaccaggtttgagcctatctaatgaatccatgaggtagacagcctgcacatgtccacttggtttgatgaattgcacaaatccctatgggggatgtggttcatgggctgggaagtgggttaccctgggaaaggtctacaggacagaggcagggatggagacaacagcatggtgagttcccaacccacccacgatgataggtgtctgaggcagaaggtaaagaggctgtcacctggtgggtgtcataagactcaagtgtcattgttgaggcacatgggtaacaaagcgtggcactggatgggggtagattcttcctatttctgtgaggatcagggggactccctggctctcctgctaaaggtggctctagggacaggaagagtgtacttcttgacagggatgtcagagcactgatggtgacaatcagtgtgacactgctcacatgactgaacaaccgagaagagcccgactgtctactgaacaacgggaagagcccgactgtcaatgacggagctctgttaaatatagttaaggctattttgttgaatgaatgaagccagacaggaaagaggacagtatctttaatccatttatagaagttaaagacaggcttatttaatctctatgaagacagagtggcccttacctctgggtggagcaaaaggcaccttctgaagtgatagggatgttccttatcatcttgatccggagtggtagttacatgcatgtatgcatatcaaaactcaccaagctgtaccactaagtgtgttcttcctcaataaaaataataaagaactacacttataaagaattttttaataatataggaaaatgtctacactataatctttagctaaaaaaaaaaaaaaagaagccgcctacagaatggtatatgcatgagaacaattaatcgaaaagtgcatgggaaaagtcaggattgaaacatcatgttttaaaagacattgttttgatactgtgagaatgtacctaagtttttccttttttctgtttttcccaattttatacaatgagcatgtgttggttttataattagacattttgtttgtttggtttggttttgagacacagcttgctgtcacccaggttggagtgcaatggcccaatcttggttcactgcaacctccatctcctgggttcaagagattctcccacttcagcctcctgagtagctgggactataggggcgcaccaccacatccagctaattttgtgtatttttagtagagatggggtttcaccatgctggccaggttggtctcaaactcctgacctcaagttatccactcgccttggcttcccaaagtgctgggattataggcatgagccaccgcacttggcctagacatttgtttttaaaaataaaagattcatttgctctttttacagcccgtctcactgttgactgatattgaccaggagtcaactcaggccccagggattttcacaacagctgctgtatggcagggtttctgctcactgtgctcatgtagttggcccttgcacccaaagtgaataattaacattctccccatcctgttgacgatgctctgaaaatatggtccagaaatggtgtgagcaaggagacagcaaagcaatgcttggaacataggtgcagtgactagacatggggcagctgtttaaagacaaaaaggccccaaaaaggagggatggcacgaaacaccctccaatatgggcatggagtctagagtgacaaagtgatcaaaagttcatttcctatggggtgtccgaatgtacttaataataaaaagagaacaagagccatgcaaactgagagggacaaagtagaaagagtagcagacaccaagcaactaagtcacagcatgataagctgctagcttgttgtcattattgtatccagaacaacatttcatttaaatgctgaagaatttcccatgggtccccactttcttgtgaatccttgggctgaacccccctgtcctgagtggttactagaacacacctctggaccagaaacacaaaagtggagtaacacacactgcaaagctgtgcttccttgtttcagcctgtgaatcctcaccttgtttcccatctagcctatatttttcaaactaacttggccatagaatcatgtagtatttagggtggaagctgccccaggtctagcacgtcatttaacagatgaggaaatggaagcttgggcagtggaagtatcttgccgaggtcacacagcaagtcagcagcacagcgtgtgtgactccgagcctgctccgctagcccacattgccctctgggggtgagtatgtcttcacatcctccaataccctaatgacagacaaacagaacatggcaaagcctcagctctgcatggtgaaagtaagaaccagcaattgccacaaacagaaatacagtgttggtccggcagcctccgggggttctgcacaagtggattaccagtgaatacaaggctatctatctttcgaaaaaccaacgttgtatttatgctattttctataaaattttatattaatttatttgttacctatttttgaactctttcaaaagcacactttatatttccctgcttaaacagtcccccgagggtgggtgcccaaaaggctctacacttgttatcattccctctccaccacaggcatattgagtaagtttgtatttgggtttttttaaaacctccactctacagttaagaaaactaaggcacagagcttcaataatttggtcagagccaagtagcagtaatgaagctggaggttaaacccagcagcatgactgcagttcttaatcaatgccttttgaattgcacatatgggatgaactagaacattttctcgatgattcgctgtccttgttatgattatgttactgagctctgttgtagcacagacatatgtccctatatggggcggggttgggggtgtcttgatcgctgggctatttctatactgttctggcttttcccaagcagtcatttctttctattctccaagcaccagcaattagctttaccttttcagcttctagtttgctgaaactaatctgctatagacagagactccggtgaaccaattttattaggatttgatcaaataaactctctctgacaaaggactgctgaaagagtaactaagagtttgatgtttactgagtgcatagtatgtgctagatgctggccgtggatgcctcatagaatcctcccaacaactcatgaaatgactactgtcattcagcccaatacccagacgagaaagctgagggtaagacaggtttcaagcttggcagtctgactacagaggccactggcttagcccctgggttagtctgcctctgtaggattgggggcacgtaattttgctgtttggggtctcatttgccttcttagagatcacaagccaaagctttttattctagagccaaggtcacggaagcccagagggcatcttgtggctcgggagtagctctctgctgtcttctcagctctgctgacaatacttgagattttcagatgtcaccaaccaccaagagagcttgatatgactgtatatagtatagtcataaagaacctgaacttgaccatatacttatgtcatgtggaaaatttctcatagcttcagatagattatatctggagtgaagaatcctgccacctatgtatctggcatagtgtgagtcctcataaatgcttactggtttgaagggcaacaaaatagtgaacagagtgaaaatccccactaagatcctgggtccagaaaaagatgggaaacctgtttagctcacccgtgagcccatagttaaaactctttagacaacaggttttttccgtttacagagaacaataatattgggtggtgagcatctgtgtgggggttggggtgggataggggatacggggagagtggagaaaaagggggcacagggttaatgtgaagtccaggatccccctctacatttaaagttggtttaagttggctttaattaatagcaactcttaagataatcagaattttcttaaccttttagccttactgttgaaaagccctgtgatcttgtacaaatcatttgcttcttggatagtaatttcttttactaaaatgtgggcttttgactagatgaatgtaaatgttcttctagctctgatatcctttattctttatattttctaacagattctgtgtagtgggatgagcagagaacaaaaacaaaataatccagtgagaaaagcccgtaaataaactttcagaccagagatctattctctagcttattttaagctcaacttaaaaggaagaactgttctctgattcttttcgccttcaatacacttaatgatttaactccaccctccttcaaaagaaacagcatttcctacttttatactgtctatatgattgatttgcacagctcatctggccagaagagctgagacatccgttcccctacaagaaactctccccggtaagtaacctctcagctgcttggcctgttagttagcttctgagatgagtaaaagactttacaggaaacccatagaagacatttggcaaacaccaagtgctcatacaattatcttaaaatataatctttaagataaggaaagggtcacagtttggaatgagtttcagacggttataacatcaaagatacaaaacatgattgtgagtgaaagactttaaagggagcaatagtattttaataactaacaatccttacctctcaaaagaaagatttgcagagagatgagtcttagctgaaatcttgaaatcttatcttctgctaaggagaactaaaccctctccagtgagatgccttctgaatatgtgcccacaagaagttgtgtctaagtctggttctcttttttctttttcctccagacaagagggaagcctaaaaatggtcaaaattaatattaaattacaaacgccaaataaaattttcctctaatatatcagtttcatggcacagttagtatataattctttatggttcaaaattaaaaatgagcttttctaggggcttctctcagctgcctagtctaaggtgcagggagtttgagactcacagggtttaataagagaaaattctcagctagagcagctgaacttaaatagactaggcaagacagctggttataagactaaactacccagaatgcatgacattcatctgtggtggcagacgaaacattttttattatattatttcttgggtatgtatgacaactcttaattgtggcaactcaaactacaaacacaaacttcacagaaaatgtgaggattttacaattggctgttgtcatctatgaccttccctgggacttgggcacccggccatttcactctgactacatcatgtcaccaaacatctgatggtcttgccttttaattctctttttgaggactgagagggagggtagcatggtagttaagagtgcaggcttcccgcattcaaaatcggttgcttactagctgtgtggctttgagcaagttactcaccctctctgtgcttcaaggtccttgtctgcaaaatgtgaaaaatatttcctgcctcataaggttgccctaaggattaaatgaatgaatgggtatgatgcttagaacagtgattggcatccagtatgtgccctcgaggcctcttaattattactggcttgctcatagtgcatgttctttgtgggctaactctagcgtcaataaaaatgttaagactgagttgcagctgggcatggtggctcatgcctgtaatcccagcattctaggaggctgaggcaggaggatcgcttgagcccaggagttcgagaccagcctgggcaacatagtgtgatcttgtatctataaaaataaacaaaattagcttggtgtggtggcgcctgtagtccccagccacttggaggggtgaggtgagaggattgcttgagcccgggatgatccaggctgcagtgagccatgatcgtgccactgcactccagcctgggcgacagagtgagaccctgtctcacaacaacaacagcaacaaaaaggctgagctgcaccatgcttgacccagtttcttaaaattgttgtcaaagcttcattcactccatggtgctatagagcacaagattttatttggtgagatggtgctttcatgaattcccccaacagagccaagctctccatctagtggacagggaagctagcagcaaaccttcccttcactacaaaacttcattgcttggccaaaaagagagttaattcaatgtagacatctatgtaggcaattaaaaacctattgatgtataaaacagtttgcattcatggagggcaactaaatacattctaggactttataaaagatcactttttatttatgcacagggtggaacaagatggattatcaagtgtcaagtccaatctatgacatcaattattatacatcggagccctgccaaaaaatcaatgtgaagcaaatcgcagcccgcctcctgcctccgctctactcactggtgttcatctttggttttgtgggcaacatgctggtcatcctcatcctgataaactgcaaaaggctgaagagcatgactgacatctacctgctcaacctggccatctctgacctgtttttccttcttactgtccccttctgggctcactatgctgccgcccagtgggactttggaaatacaatgtgtcaactcttgacagggctctattttataggcttcttctctggaatcttcttcatcatcctcctgacaatcgataggtacctggctgtcgtccatgctgtgtttgctttaaaagccaggacggtcacctttggggtggtgacaagtgtgatcacttgggtggtggctgtgtttgcgtctctcccaggaatcatctttaccagatctcaaaaagaaggtcttcattacacctgcagctctcattttccatacagtcagtatcaattctggaagaatttccagacattaaagatagtcatcttggggctggtcctgccgctgcttgtcatggtcatctgctactcgggaatcctaaaaactctgcttcggtgtcgaaatgagaagaagaggcacagggctgtgaggcttatcttcaccatcatgattgtttattttctcttctgggctccctacaacattgtccttctcctgaacaccttccaggaattctttggcctgaataattgcagtagctctaacaggttggaccaagctatgcaggtgacagagactcttgggatgacgcactgctgcatcaaccccatcatctatgcctttgtcggggagaagttcagaaactacctcttagtcttcttccaaaagcacattgccaaacgcttctgcaaatgctgttctattttccagcaagaggctcccgagcgagcaagctcagtttacacccgatccactggggagcaggaaatatctgtgggcttgtgacacggactcaagtgggctggtgacccagtcagagttgtgcacatggcttagttttcatacacagcctgggctgggggtggggtgggagaggtcttttttaaaaggaagttactgttatagagggtctaagattcatccatttatttggcatctgtttaaagtagattagatcttttaagcccatcaattatagaaagccaaatcaaaatatgttgatgaaaaatagcaacctttttatctccccttcacatgcatcaagttattgacaaactctcccttcactccgaaagttccttatgtatatttaaaagaaagcctcagagaattgctgattcttgagtttagtgatctgaacagaaataccaaaattatttcagaaatgtacaactttttacctagtacaaggcaacatataggttgtaaatgtgtttaaaacaggtctttgtcttgctatggggagaaaagacatgaatatgattagtaaagaaatgacacttttcatgtgtgatttcccctccaaggtatggttaataagtttcactgacttagaaccaggcgagagacttgtggcctgggagagctggggaagcttcttaaatgagaaggaatttgagttggatcatctattgctggcaaagacagaagcctcactgcaagcactgcatgggcaagcttggctgtagaaggagacagagctggttgggaagacatggggaggaaggacaaggctagatcatgaagaaccttgacggcattgctccgtctaagtcatgagctgagcagggagatcctggttggtgttgcagaaggtttactctgtggccaaaggagggtcaggaaggatgagcatttagggcaaggagaccaccaacagccctcaggtcagggtgaggatggcctctgctaagctcaaggcgtgaggatgggaaggagggaggtattcgtaaggatgggaaggagggaggtattcgtgcagcatatgaggatgcagagtcagcagaactggggtggatttggtttggaagtgagggtcagagaggagtcagagagaatccctagtcttcaagcagattggagaaacccttgaaaagacatcaagcacagaaggaggaggaggaggtttaggtcaagaagaagatggattggtgtaaaaggatgggtctggtttgcagagcttgaacacagtctcacccagactccaggctgtctttcactgaatgcttctgacttcatagatttccttcccatcccagctgaaatactgaggggtctccaggaggagactagatttatgaatacacgaggtatgaggtctaggaacatacttcagctcacacatgagatctaggtgaggattgattacctagtagtcatttcatgggttgttgggaggattctatgaggcaaccacaggcagcatttagcacatactacacattcaataagcatcaaactcttagttactcattcagggatagcactgagcaaagcattgagcaaaggggtcccatagaggtgagggaagcctgaaaaactaagatgctgcctgcccagtgcacacaagtgtaggtatcattttctgcatttaaccgtcaataggcaaaggggggaagggacatattcatttggaaataagctgccttgagccttaaaacccacaaaagtacaatttaccagcctccgtatttcagactgaatgggggtggggggggcgccttaggtacttattccagatgccttctccagacaaaccagaagcaacagaaaaaatcgtctctccctccctttgaaatgaatataccccttagtgtttgggtatattcatttcaaagggagagagagaggtttttttctgttctttctcatatgattgtgcacatacttgagactgttttgaatttgggggatggctaaaaccatcatagtacaggtaaggtgagggaatagtaagtggtgagaactactcagggaatgaaggtgtcagaataataagaggtgctactgactttctcagcctctgaatatgaacggtgagcattgtggctgtcagcaggaagcaacgaagggaaatgtctttccttttgctcttaagttgtggagagtgcaacagtagcataggaccctaccctctgggccaagtcaaagacattctgacatcttagtatttgcatattcttatgtatgtgaaagttacaaattgcttgaaagaaaatatgcatctaataaaaaacaccttctaaaataattcattatattcttgctctttcagtcaagtgtacatttagagaatagcacataaaactgccagagcattttataagcagctgttttcttccttagtgtgtgtgcatgtgtgtgtgatgtatacaaagagagagataattgtatttttgtattttcttttaaataatttttaaaattgacccttttcctgagacaaattgccagaatagtttgtatttagagatggtacctctaagagtaaggttgctggttgctgagcaattgacttgaaaacttttaaaattcaaattttaattccactactcaaaagaattgccatgttttaaaaaagagaattggtgccataagttagttgtctatgtttgaaaatgaagaagatatgcaacgtcatggcctggtcacttacccgcagccctgagttgtaggcacatcatatgtgagaatgaggatgcttttctttcatttaaaatccctccccaaaacttggctctaattgcagtcatgacaatcatgtacatttggatttatgtgcacgagtctcttaccctgagagaggacaggtgctacaggtggaggggacccgtctgggtcacgttcacattttgaacatgctggttttcagtcactgcacactcatctcccagcgcaggtcatgggcagcagatgcaaaagctgcccgtggtcctatttggaggtgcatgaaatgagcagaagacagaatagcttgatctgactagaagggcagcttgtccctaccaagacttgaaggattgcctttcatctgttagggtaaaaggtagaatgaaccaaggaagggcaggagggggctggggttagggtagaaggaaggggccatggagaagggagatccatcccataggaggaaggcagtgcggcagggaggtttgaaggtatcagcttttgtggctgacatacatgcagtcatgtcaattgctcgtttttccttttccatcttattaaatgtcttccaatgttagcacgaagaaaagctatttgcagtgttgccagcctttccagagcccgtccccattacctccccaggcccatgcctttactccttggagtttcaactcacgaccttcaggatctgactttattcaccaactctggggtgaacgtaccttctgtctccacccagaggtctctatcaaagaggagattgcatgccatggataaagtcaaagtagaggtgactgtccttaggaagagtaatgtgaaaattcataaactgggattctgtttacattttgtactccaggggttcttagtttaaatcgctctgaataaattaagatgcaatggcatttcaactgttatgattaaatttacaaatcatttattttctatcacggggagagatagagctccaaatgcaaacataactgctcaagtgttaacacttataatgaaaacataagaattaccaccaactaccctgggggctagaagcagaaatgtgaaccagaaaacaaatcatgaactttcctttttttttttgagatggagtctcgctctgttgcccaggctggagtgcaatggtgcgatctcggctcactgcaaccactgcctcccgggttcaagcaattctcctgcctcagcctcctgagtagctgggactacaggcatgcaccaccacgcctgggtaattttttgtatttttagtagagacagggtttcaccgtattagccaggatgctctcgatctcctgacctcgtgatctgcccgcctcggcctcccaccgaagtgctgggattacaggcatgagccactgtgcccggccaacaaatcatgaactttctaactgcagttccttgtagcttgttaacacatccacttacttattgtcagagtacgtggagattttccacaaccctcggggataaggctgaacagaagaggcaaaaacgtgaaaacatttcgatagctcctatactttgaaataaaattcactgtaaaagttgcttgtatttttccaaaacagagtcaacccttaatatttaagattctgtatacaaatacatatttttatataattaatatatattgtcatatgacatatatctttatattaatatgcatgcatataatatatatttccttcctaattttctataagcaattttacaagactgacttctatttgcctccttattgttactacgtggtttgataatccgttttgtgtcattgtgattctgtcatgttttggggacttatttttgtttctctgggtggtcactagtttttttaaagcattcatggaagagtgtgaatcttttacaagctaggaagccatggcaagccttgggtcatactgcccccgcgaggccacattggcaaaccagcaagggtgttcaacttccagacttggccatggagaagacatacgaggaggcttttcacattcagctctttaatgtttgtctctgccggcaccatcccagttgtgaataagaggtatttccacagcggctcagggtaggtagtgcacagctcacattcatcatttctgaaaaccgagaggagtctccattcggggtacaggttgatgcctgtcgtggaatgaaggttccaacacccagaccaatctctgcagtgtgctgctctcatgagcttgcaacaagatcagaaaatgttttgtgactaagcatttttcatattgcataaaatgcttcaagctcctcccttgtttctctctataatcctgtatatctgatgattgtgggtaccaagtgtttgaaataatcaaatgtgatttgatgttggtaaatttctttttttttttttttttacttctattttttttattatactttaagttttagggtacatgtgcacattgtgcaggttagttacatatgtatacatgtgccatgctggtgcactgcacccactaactcgtcatctagcattaggtatatctcccaatgctatccctcccccctccccccaccccaccacagtccccaaagtgtgatattccccttcctatgtccatgtgatctcattgttcaattcccacctatgagtgagaatatgcggtgtttggttttttgttcttgcgatagtttactgagaatgatggtttccaatttcatccatgtccctacaaaggacatgaacatagcaaagacttggaaccaacccaaatgtccaacaatgatagactggattaagaaaatgtggcacatatacaccatggtaaatttctttatcattcgcactctcctttctctattattgttattgtaactgaaccgcagattagtcactcattgcttgcagaatccaattaacaagagcgaggtcagatataaagaaaatgatttattccaaacctccttcagggaagaggtgcagcctcctgcctctaaatgcactgcttcgccaggcgtggtggctcacacctgtaatcccagcactttgggagaccgaggagggcagatcacttaaggtcaggagttcaagaccggcctggccaatatagtgaaacccctgcctctactaaaaatacaaaaaattagccagacgtggtggcgggtgcttgtaatcccagctactcgggaggctgaggcaggagaatcgcttgaacctgggaggtggaagttgcagtgagctgacatctagccactgcactccagcctgggtgacagagtgagactctgtctcaaaataaataaataaataaataaataaataaatagtaaatgcactgctttgcttttggagcagaaagcaggcactttgaaaaggcaggggaggaagtgagcaagggcagggggtctgcacactggcatggtgcctgatctatccaggcagttgaattggcactttcataggcagaaataagttgaaaaagtggcctaaaactctctaggtgggagtggatagtgggcatgccttcaacctgcctttctggagggtgagttccatggcaaccccctgaagggtgagagttccatggagatcatgctttggtctgtaaatcagctgttaactctctagaaagttctgtcttggagcatatagttagatgaacttgccctgtaaagaatgtctggtgaaggggaagtaaaaggtgagatttgcatttctaaagggctaagtagaacgtggggtacaagaggaaaggagaaaagagaaaataatttaaaaaataattgtaacttattcccttttacttagaaaaaagggaatactcagttacattatcacctcgtttacatcaaaccctcttatggaatcctatggtttgaaaacaaaaaggttgttgaggaccagtgagcccaacccctttgctttataaatgaagagcattgcctgccctaagccccagagactctgatgtcgtgggtctggagtgggctccaacagcggcatgttttgatggtgcttcccagtggcacgccagcgatgagcctttgagtagggaaagtaggagcactcgtgactcccttcacgatcagcacctgtgtgctaataaattcacaaaagccaacatattggagtcactcagggagttttacaaatagtgaggttaaatccaacctcaaatagttctgattcgatctgcctgcattgctgccctgtggttccccactgtagaagctccccaggtgattctaagtgtagccaagtctgagaaatactgcctaaagcctgttggactgacagcaagggctgttgtctgagcaagactttgcctggcctggggtggcatgtgcaccaggaagagtctcaactttcataacagaacattccccaagctggtttttttaaagcatgtgaatctagacttcattggcaataccaaagatctgtatttgaggctccaagtatttcactttcatttttggttttgggttatgttttcacccttcctttccaagtgaaaagtaaacagaagtgggatgtctggcgcccatgctgagcttggcaacttcaaattcaatagagaagaagtctcttgtatagaaaagggcctgtctgagatgtttctcaaataaatatagattttgcttatgtggctaaaggattcttctccccccatttccttatccctgcagtgagccatccttcttaactctttccatgaaagcattattcctgaagaactgggaactcatgccagccctgatcaggcaatgataattctgcagagaattagaatttagatttaaattgtcaactcttatacatcctggcatatggtttaaacacatgtacacacacacaaacacctcctactatttactgaagagcagatatctgataacttaatctttttggttttgagtcaagacaattcctccttttgaaactgcataccgctgaatataataaaatgtaattaagattaaaaataagaaactaatgggagaatttcaatattgtctctgttcactttaaaattcctctacttaggtttactgccattaccaaagactattcaaaaatcctttttaggagaatcctaatggtttcctgacatataatcaaataaggactctgttgattggctaactcaatcttcctgtgccaaaaagcagagcccagcagagaagagggcagggacttgaaagtcagactgactcgagttccagccttggggctgtgggagcttgggcaagtgacttaacgtctctggctctcaggatctaaaaggatttccagtagtaatttggggtgttactgatacaggagctaaaaagaaattatttaggtggttagtgagggtcagagagtcctcggtaagatttgccttttaacaaaaagcagccccaaaatcatttgtttgctaacaaagagaagcctgtaaaattgagctgcagacatagataagcaagctggaagcttgcacgggtgaatgccggcagctgtgccaataggaaaaggctatctgggggccaggcatgttcaacatggattctccatcttcccttttctttgtcaaccaagtgtacagtaaaggaacaggcaacatggcacgggccaggtagagaacccttctgcataataaaagattagggtgagatggccagcttcttcccgtgctatgtaaatggcatacctggtccaaccagtcttttgggccctgtgtaaatcagacaccgcctcctcaagttagtctataaaaccccatgcattttaccgtgaaactgggagatccactcggaaccccctcctgcacgagagaccttttctcttttgcctattacacttccgctcttaaactcactgctcatgtgttagcatccttgatttccttggcatgaggcaatgaaccttgtgtattaccccatacaaatgatgctgcttcattactaatagcaacctgacagggttgtgttggggtataaattatctagaccagggagatccaatataatttttttgtaatgacgggaatgctttgtatctgcatcatccaaaatggtagccaccaggccagggtgaaatgtggccagtgtgactgaggaactgaatgttttccatgatttaatttaaatgtggccaatggctactgtaggagacagtgtgagtctggcatattataaataataaatattaatataatttgaactttggcatcagtgtttcctagatttgaattactatgcaagttgcttactgtttccaagcctcagctttctaatctgtaattggggctaataatagtatctgccttacaggtttgttcagaggataaatgagaaattgcatgttgagggcttaacacagtgcctggcacataaaagctctggtaacagttagccactttaataatttgctaataatggctatttcttcttcagattaggatgtgctcccccaaacagtgcacttagacatagcgggcaatccagctcactctctgcagtgagagagaagcactggccgaccagagtcagccaggggctcatgggtatgaaatcaacagcatgattttgtaagtaatggatggaaagggcctcacaactttatggcactgtgttcaatttgcttggtcttctgtagctccttttgaaagccttttagggtggattaacctgctaccaataattctggtcagatgtagactccatagctcaaagcaaactgagagagtgagggcagcaggccaattccccaccccttccttctggactctgacagaagcttacactcaaggaagagcaagtaggaattaacgtgttaagagctaggtaagcaaaacccaatgagaagttctggcaaagccccatgggcaggggtggcttaggcacaggaaacaagtaggatttcataccacgcgcctcagtctacttccggggccctcatcctcagctgtgcctatgcaaaggagagcaaccaataaaccccaccgccactctcctactgtggaggccagggatggccaggggtaagagagggatgggaagtgtttcctccagccgtcctctgagaaggagaggaaactgggcagagcttctgtcctccttcaagcagaaacagaaacaaaagaaacccctaagggggttcttacttcccctctagttcagttgtgcactaaccatctgcagctcaacattcagcattcattcattgattcagcaaacattgaaggagggccagctatgtgccagatgccaactcatgccatgaaagagagtccctgtccttatgaaattcactatttagagagaaaagcaagcaaaaaggcaaagtttgaaaagtactgttgaagtggcatcattgtctggggtgaatacctgaggtttgtggtctcacgccaagggaatcaaggactcaggcacacaagaagtgagtttaagagcagaggtttaataggcaaaagaaagagaaaaaagaatagctctcttgcctgcacagagagaggggcacctgagtggatcttcctgttttgtggtgaaatgcaaggcattttatagacgagcttgaggaagtggtgtctgatttacttaggacccgagagattggtcagaccaggtgtgatgtttacatagcatacaaagaagctggccatcccatcctaatcttttattacgcagacggggtctatacctggctggtgccatgttgtctgttccttactgtacacgtggttgacaaagaaaagggaagatgaagaatccatgttgaacatgcctggcccccagatagtcttttcctattggcacagctgccggcattcactcttgcaagcttccagattgcttatctatgtctgcagcccaattttacaggttgctctttgctagaaaagaaatgatttgggggctgcttttcattaaaaggaaaaccttaccaaggttaaaaagaaaaaaatttctttttaatgcctatgttactgtgaacagtgtcgggataaggctctgagagccagatgaggatgagttatccaatccaaggatgggggtctggaggaaaaaatcctagagagcattgctgcagttgaataaggattagttagaagctactgagtggagcataggagtaggaactcttatgcaaatgtgcagaggtgaaataaagcaaggtatagtccaggtgcctaaagtagcacagctgacttgagatagatgatagataggtagatagatggatagggtacatagatgatagatagatagatagatagatagatagatagatagatagatagacagacagacagacactggtgtgagtgtgggtgtgtgtgtctggctgcgtgcatgcattcctcctgcaggagatcaggagcagtgggcagtatggagtgacaagaagattgggaggtactccttctagccctcccctctgctctgccctccactggagcagaagcaaagcatatggtgaaggggaacaaggagtctccccagcacagtacccgagtgcattagctatttatcactccacagtccccattcacgtgttaattcagcatttattgaatgcttactgtttgcaatgtctatgtcaagctgtcaagtgtagtttttattctacaggccacaggcaccccctaactgtgttaaacaagatggtagtattgagacaggaataataagggtggtcacaggagaatggaagattccaggcagcagtttgactagtaaaaaaggaaactgttgaaatagctgcataatccaggggtcaataagaacctgagaaccagggtgtgagccaaggctggttaaaagcaactggatccaatatggtgctgagtttctcctaggttttgcctggaacctcattatatgctcaataacataccaaatcacacacccaccagggccattccatttcctggaacactcatgtttggtgtaaaaatgggtggcaccacagctctgagaaatctttacctttttcaggaaacttcatgaatattccatcctttggttaaagaaacccataatgtagaagccccaaaccctactgggcgcaactctctctctcttgagtatgcctgcacttccctttattatttatttatttatttattatttatttatttattttttagatggagtctggctctgtcacccaggctggagtgcagtggcgcagtctcagctcactgcaagctctgcctccagggttcaggccattctcctgcctcagcctcctgagcagcagggactacaggcgcccaccacaacgcctagctaattttttgtattttcagtagagatggggtttcaccatattttattttatttttgagacagggtctcactttgttggctcgctgcaacctctgcctcccaggctcaagcaatcctccaacctcagccccccaagtagctgggaggacagacgtgcaccaccacacctggctaatattttgtatttttttttgtagagacagggtcttgccatgttccccaggctggtcttgaactcctggactcaggtgatcagcctgcctccaccttccaaagtgctaggattacaggaatgagccaccccacccgaccacactcccatttcttgagtgtgtgcattttgctctgcaataaatctctctactttcacttttctctgactcgtccttgaattccttcttgtgacagcgtcaacagcctggacaccaggtgcagtcaacgtctcaccagtgtttagggacctcccctaatccactggtatcagcatgatcagacttgctttttcagaaaaagccttctgtccatagaccaaagggaagtgactcagagaaggggcaggaggaatcacaagctccctgcctgaccaggcctggactatggcagagacagtgagatggtgagaaagcaagggtagacagccagccaaatccagaatatagaaagttctacaggaaaaggtggggccaaggtgggacagggggaaaggaattgttgcacattaacagtgcaatgcagagcactggtcttgtttatgtccaggttagaacaaaccaatgagaaagcacatctttgagacaactggagaaatttgaacactgactagatataatattatgttaattatgctttaatttggggtacaataatgcttttgtagctatttctaaagagtccttatctcttaaggatacactctaaaatactagtggattaagttatatgatgtttagactctttttaaaataatccagtggggtgagaggcagagggaagggagaggagcatagaggaaacagtgttggccatatgtttgtaattgttaaaactgagtgatgggaatatggagatttaacatattaatactattttctgcccatgtaatatttgaatattttcataataaaattgagagagagataaagaaagaaaagagaaaagaagagaagagagaagagataagggaagtggaggaaaaagagctttcttcaaggaccattgtggtggacacaaatgaaagatacccccttcctactatgaattctaggtgtgtactacccaagatgagtcaatcggatcctagcttccagaaatcgtgagcatgatgcagccctacagacgcagtgccctggaaaggagacccatgaccatccaaggaagatgtcccatcacagaactgccctgggtcatgtgttttccaagtccacatgtccggtagttccttctttcctatgaccaatgccaccagtcttccagcactgtcctttattgctaggcaaacctgagccatcctcttcttcttgcaacttgtgcctgaagtaacatggacacaaagtccccacttttcccacattctcagaatgaagtagttctccctccacactttaggtgctagaggcaagtggattgcttgagctcaagagttcaagaccagcctgagcaacatggcaaaaccccgtctctacaaaaaatacaaaaattaactgggggtggtggtgtgcacctgcagtcccagctactcaggaggcagagaaggaggatttcttgagccctgaaggtggttgtgttacgtgcattcatgttaagagaccaccaaacaggctttgtgtgagcaattaagctttttaatcatgtgggtgcaggcagactgagtctgaaaaaagagtcagcaaagggagatagggatggggcggttttataggatttgtgtaggtagtggaaaattacagttaaagggggttgtcctcttgcgggtacaggcgggggtcacaaggtgctcagtggggagctcctgagatttattgtccaggagaaggaatgtcacaaggtcaactgatcagttagggtggggcaggaacaaattacaatggtggaatgtcatcagttaaggcaggaactgggtattttcacttctttgtggttcttcagttgcttcaggccatctggatgtataagcgcaggtcacaggggatatgatggcttagctcgggctcagaggcctgacattcctgtcttcttatattaataagaaaaacaaaacaaaatagtgatgaaatgttggggcagcgaaaatttttgggggtggtatggagagataatgggtgatgtttctcagggctgcttcaagcaggattaggggtgacacaggaacctagagagtgagagagattaaactgaagaaagattttgtggtaaggggtgatattgtggggttgttagaaagagcaattctcatatagaatgattggtaatggcctggatgcagttttgtatgaattgagaaactaaacggaagacacaaggtctgaataagagaaggagaaaaacaggcattaaaggactaagaactgggaggacccaggacatccaattagagagtgcccaagggggttcagcataattatttgcttggttggtgagtttttggtctccatccttgagttttttttatgttgtcatatgccaggccagattgatttaggtaaaaacaacactcttcatttaaaaatatacagagttctcctttctcagcagtgagtaagtcaaggcctcagcagttttggaggaaagagaaatgcaaaggaagcaattgtttgttaagaaggattagaaatggctaggagagagtgagtgagattgatagtgtggtggagatagctgaggagaggtagagggtggcataagaatgggaacgagaataagagtgagtataaaagtaaagaatagaacttcatcagggtgaaagtattggagggtgccctgtcagcaaagatcatctgtccactccaagagggagtcaagagtggcggattggggatagtaccaggagatatccactatgatggtttggaggaaaagtgtaaactggcagtgtaaacaggggcagggcatttatgagtcattgagaatggtgaataggagtatgactagacagaagatagtggagatgacaaattttgggggcacagtccaaatagtgggggtgactgcgtagagctctgttgcaaaaagtagggtaaggataaatagacttaatagaatgaagagatgtattaggctcataagggttattattgttcttcagaaatgcgagtgagtttaagggaagtaggggtgagtacttgcgacttccagaaggaagaggagagatcaggctggctgtctgatgggcacagctttattctggaacagtgaatccaatggggagggtcgtgcagacggatggcagttggggtgctataaatgaccaggtagggtccagtccatcaaagctgtagagtgtgaggggtcagacttgacaaggactgattgcccagctaaggtatcttcacatggctgggagtttggaggaggcaagagaagattagcagcctggcgaatttcctgtctagcctgctggaggactggaagataaaggcaacaggtcgtgggcctggatcctgtgtgaggactctagcagcacagccttgtatttcagctgtgtgtaaggaaaaaggatgggacgagtcggggagtgctagtgtgggagctgtctccaggtcctttttgagagagtgaaaggaagaatggggaaaagacttatggtctatgggattagttaaattaccctttgtgagctagtaaagtggtttgattaggatagcaaagcccggtatccaaagttggaaatatccaacaatgcctaagaaggaagggagttgttgtttggtggtgggggttggggtctgggagattaactgaacagagtctgcaggaagggtatgtgtatgttgatggagcattataccaagataggtaatgctaggggaagaaatttgtgcctcagagggcaatactttgtacccctttgagtaaagatgttgaagaagcaggctagtgtcctgctgggaagattggtaagaggggctgcaaagaagaagatcatcaacatattgaataaggtgggaggtagatgggtgaaaagaaagcagatcatgagaaagggcctggccaaagtaatgtgggctgtccctgaagccttggggtagaaaaatccaggtgagttgttgggactggtgggtgtcagagtcagtccaagtaaggcaaaaagaggctgggaggagggatgcaaggggatagtaaagaaggcatctttgaggtcgataacagaatagagttgtggaagggtgtattgaagataggagggtgtacgggtttggcactataggatggatgggaaggacgatttgatcaacaagacgaagatcctgaacaaacctgtaagacttgtccggtttctggacgggtaggataggggagttgtaaggagaatttgtaggctttaagaggccatgttgaaacaggcaggtgataacaggctttaacccttttaaagcctgctgtgggatgggatattggcattgagcggggtaagggtgattacattttaatgggatgataaggggtgcatgatcggttgccaaggtaggagtagaggtttcttatacttgtggattaaggtggggagatacaaggggaggatgtgaaacaggtcttgagttgggtaaaagtgcagcaaagagatgtggctgcagcccaggaatactcagggaagcagataatttggttaaaatgtctcagcctattaaggaagctggacaggtggggataactaaaaaagtgcataaaagaatgttgtccaagttggcaccagagtgggggagttttaagcggtttagaagcctcgccgacaatacccacaacagttatggaggcaagggaaacaggcccttgaaaagaaagtaatgtggagtgggtagcctccgtattgattaagaaggggacagacttaccctccactgtaagagttacccaaagcatctgtgatggtccaggaggcttctgaggtgatcaggcagtgtcagtcttcagctgctaagctgagaagatctgggaaggagtcagtcagagagccttgggccagagttccaggggctctgggagtggttgccaggcaagttgaacagtctgatttccagtggggtctcgcacagatgggacattccttggcccagtggccagatttccggcacttgaaggaagatcctgggggaggaggtcctggagaaatgcctggcccctgcagtttaggtgttttgaagttcttgtgtgctggagatgtggctggggtttctcttacagcggaggcaagtaattgcaactcagaaatatgttgtcacttggctgcctcttttctattattgtacaccttaaggcgagggtaattaaatcctgttgtggggtttgagggctggaatctaatttttggagctttttctaatgtcaggagcagattgggtaataaaatgcatattgagaataagacggccttctggcacctctgggtctagagaggtaaagtgtctaagggttgttgccaaacaggccatggactcagctgggttttcatatttgatgaaaaagagcctaaacgctaactgatttgggagaggtcagctaaagaaaaaggagcattaaccttgactatgcctttagctctagccacctctctaagaggaaattgttgggccggtgggggagggctagttgtggaacgaaactgtaagccagaccaggtgtgaggagagaaggtgaccaaaggtttatagggtaggggagcagaggctggggaagaattgggacctggctaggcctagcgaggaacagcctggggaggaggggagaaatcagatgggtccgtagaaaaggaggattcaaaggactcagagcttggggtggagactgaaggaacagacaggagagaaagaggaaagatttgggatgagtcacattgggagcagagactagagagggactgatgtgtaaagaatgcctggacgtcaggcacctcagaccatttgcccattttacgacaaaaattatctagatcttgtaggatggataaatcgaaagtgtcattctctggccacttggaactattgtcaagtttgtattggggccaagcagtattacagaagaaaataagatgtttaggtttttaaaagagtgcataaaagaatgttgtccaagtccatgcccttcttaatcaatatgggagctacccactccacattaccttcttttcaagggcctgtttcccttgcctccataactgttgtgggtattgatggccaggcttataagccccttaaaattaccccactctggtgccaacttggagaggtcaggtgttagtcaaaggtgttttaagttttaagaacacaggctaagggagaagaagggggaatgaagcgtggaaggttgcccatagtgaaagaggtaagtttaaagagaaaggtagagacatggagaaggggggaggtgagcagccctgggctgtcatgtgggttagcagccaaagctggtgtcccagcaattgacttaccaccaagggaatgtgggtgaatgaccaaggcaggcatccccccggtgatcagacaccaaatggaatgtgggtgaaagatcaaggtaggtgtccccatgatgatcagacaccaaaggaaggctgtcttcccaaatccatgatccatgttggagtttttgagttcatggataaaatgtgtctcctttgtctctactagagaggaaaaagaactggaatttgaaggacagggagattgaagggtagggagagaggctgaagaagagagtgaggagaccgcttacccggtttgaaattggtgagatgttccttgggctggtctgaggacctgaggtcgtaggtggatcttctcatggagtgagggtgaggagaggggaccaatctcccgaaggagtcaccctgtccggggtcttcggcaccaaatgttatgcgcatccatatgaagagaccaccaaacaggctttgtgtgagcaataaagctttttaatcatgtgggtgcaggcagactgagtctgaaaaaggagtcagcaatgggagttagggttggggtggttctataggatttgggtaggtaatggaaaattacagttaaagggggttgtcctcttgcaggcaagggcaggggtcacaaggtgctcggtggggagttcctgagactcactgtccagaaggaatgtcacaaggtcaattgatcagttggggtggggcaggaacaaattacaatggtggaatgtcatcagttaaggcaggagcggcctattttcacttcttttgtggttcttcagttgcttcaggcaatctggatgtatatgtgcaggtcacagaggatatgatggcttagcttggactcagaggcctgacaggttgctgcagtgagccaagatcacactactgcactcctgcctgggcaacagagccacaaaaaaaaaaaaaaagaaaagaaaagaaaaaaaaagaagaagaaaaaaaaattttttttccaccaagaatttagtaaaaaattatagggaaaagtgtcactaattcaagggaattgcactgaaaattattcattcattcaacagatatttattgagaagcaagtatgctggtgctagggttacaacagcgcacaaattcttgtattcaaggaatgaggtaagagtatgcagataggagccagagaggtcaagaggcaattgcaacatagagtgacacgtgctccagaacacataggagggcttccaggccccatgctgggctatcagagctggcttcctgcaggtggtgtggctcagctaaaacctgagaaccaagaatgagccttctgatatctcagggttaaatcggcacaaatgaaaccattttataaccaaacaacattttccctcctgaactgcactttttctagaacccatttaatccttcctaacatgttcaatccagccccgtgatttttcagtcaaatgcaagatgcgtaggattccttttctgttcagtgctccccagccaatctttttcccttctcccaccccacagttactaattccagcgtttcagttctcagcagaggatgacagttccaccaggagacatcagtgttatctggagacattttagttgtcccagctgagggcacagtgctgctggcatctagtgggtgaaggtcaggaatgcacctcaacatcctggaacactcaggacaatccccagcaacaaaaacctacccatccagaacatcaacagggctgtggctgaggagccctgctctagtgcttcctccttactgtatcctcatcaaggagggctctggggcatgtcaggggctgctacaggctcctggcagatttcggcgacttactccagacttgtggaacattcaggattcttagcatggccacaggagagtcaggctgtccacaagcactctctctttcttcacccactcattcctgtcactctaccatttccactgccttcccaaatgcccatcgtgagtcccaccaggggccagaacaccactctctcaagcctccccagtggcgcgtgcacacctggagaacatgtctcacatcccccagccagcgagacgtcctgagattccagcacttctcagtgtctttcccagcttgtttgtatctggaatggggtggggtctctcacacaggagaaattacaaggaaaagtgtacgtgacaggaatggaggaatttctgtggaaacggtgtgtgagaaaatgtaggaagaaagaaacttcaggaaatggtaagtggcatcttgagagcagaaagtgagaagggagcagaaagaaatggggctggaacctgggaaggagaggacaggtggggatggccttgcacaccgtgggcactgaggagtgtgggcccatggcatgggtggagaggagtttcaagatagggagtagattcctattttgaacttcggattgcccctggcgatgtggagactgtattggaagaaggcaagaatggaggagagcccctaggtggaggtttggcaatgctctctccagaatatagcagaggcctcttccaaggtaggaaagccctgactggagagaagttaatggctctgagggctcaagggaggacttggattatcaggacttttagggaggcatatgatcaaggcttgggtcttggcccattgaaatggggagcactggttttaggatgtgggtcaattagtttggttttcaggacaggctgagttggatatcctgggggacctccaggtggcagtgtcaggggaagctggatgtgctgacactgaactcagcagagtgactgagtagagatcgacatctggggtcacaggcagtggatgccgtaggggtggactcaatagctcaagcagaacccggaggaatgcaggcagcaaagggagccctaaagaacagtgaggagatgtgccaagaaagagccaaatccgggggattggctgtgggagagagggctgtgggagtaagaggaagtgtcagcaacgtcaaatgttgcagagacatagagtaaggtaagagtggaaaaaacatccatggaaccctgtgatgcaatcggaatgcagaaagactttgtaactcctgcctggtctcctcctctgcccactcatggcaaaggaatacaaagtaatgttccctccttccgcctagaaaagcacaacttctgcccccaagccctgggctctcctgagaggacaggaccagcctctgaagttgaaggtcctggttctgcccccaagccctgggctctcctgagaggacaggaccagcctctgaagttgaaggtcctggtttaccagatagggaaggggccctttccaagaccctttccagaaggtgtggctgagatgggaaccgtggactctgtgcagatgtaggagctggctccagtcaagtgctaggaggttgtgggtcctgggaaggaagaggctctggagcctctgtggagactctgggactgtccttgggggagacgtgagcaggaagaagcagggccttcacagtccccagcttaggggcctcaccacccagactgaagaccaggaccaaaccctttcctgcacagttacaatgtgtcatttaattttactaaagggaatattttttaaatgaggatgctactttgtgtattaatttttacctctattcataaaagaaacgtttcttatctatttaagatgattcatatcagaccagtgtctgcccaactcgactgaccctgtgaaaactgggcacttcacactccaatgatgatggatgagtccccagcagcatagtttaagggagtgagtgggcagtgtggcctcctgtgcacgtgacttcctccttcagtgtgcccacatgtgggttccacggtcttgtgacattgtggctttagaaatttctgtttccattttctatcattcagagtaaatgaaatttgcaggaaattcagaaccttccacctgtacagtggatactgtgagactctgcccagatgccctcttcaagccaatgcatctctccatgctcccactcccatagatgggaacagaggtgctggaactcagatctactcccctttctgggaactggagctgcctgcccaggcaatgcccccttcccagggatggctgagccaatgactggctaatgttggattgcagaggcctagcgccctcccctcaattcctaattccttgtaggaataactgaggcctcctctgtgaccacgtgggcagcttctccctctgcctggtcctgtcttgttctctcctttccaattgtgtctcctggaagccctccccacaagtctgctgcatacaactctccttctcagagagcctgagccctggattcccaggaatccagcctaaaatagtctggcatttggtttcaattttctctttcactaagactcagtcacaggtgctaataaataataaaatgtcaccaccttgaattctatcactctctcttttcttgccccatctctgacaagtaggtggtccctcaagaacctgaaaagcagacattaggaggaaaggaggagtgggggcaagaggcccacacctcacctggccggctcccatccatgcgcccttgactgaggtaacacctaccctgggaatccttcccctgcctctcgtgagccaggccgggtgctcttgggacagctcccactgctcctgtgtgctcccccagcttggcacatgactccctgaattatagtcagttccgtacctgaatctccctctagaatgccagtgccacgaggacagaggacggttccactttgttcactattttctccccagggtctggcaaagttcctgggacttgggagaggtgtccttcaggagcttggcagaagccaaacggcacacttaagtagggcaactgaggtgagtttaatgaaggattctatacaaaaatttggacaaggtatagggaggccacaatacacagtgcagtgcctggtgccagtgagagcagggcactattcccactgcaaggccagacagggcaaggggagggagctgcctgacaagagctgcccttacgtcaagggacacatcagcccactagaccccatcaggagggagccagggcctgactcccctgaccttgctctccaatcttctgcctaaaattccccatcagccaaacacaactgaaaactgaaagacaggggagcctgctgttaataaggtgagcttcccccagaataaagctgggtagagagtggagaatggatatggaagggcaaaaggaagatttataagacagtgggcactaaatatctatgagatgaataaaggaaccacattttacaacaaacggtcattgaaacgctactcaatggaaagagatcatttcggtcactgtctggtgcagacaaatcaaagcccacatgcatcaaaaaggccatgtccgtgtaactccgacacggggcagacagcaaggctgaagcctatggggtatgtggagccggaactgagagatcctgatgtaaatctagcacttgggaaaagggggactagaagaaattcacccacaggcagaggaaaacacaaacacttatctatttttgcctaggctttaagtggtatgggaaaaatctctgagactacaaatcctgtgcttcatgcacaggtttataataccctcaaaatggaagaccccaaaaccaggcgcggaaaattcatatcaggccattgatgccctcaatgttcccggctgaaacaaactcaaaactcctctggaaaggagtgctcccacttcaagccatgaaaagctactgcagagaaaataatccccagtcaagacacactcacattgaaactgcaaggcacacaaggaaatggatcaccttgagtgatagctggcagagctaataaacctctgtatacctctaagaagctccacgcactagtataacccttaaagatttgatgaaatcattactttattaaaattgtttttataaaaaatcaaaatccaaaaaaagcaacaaattttataccagagccaattcggtatatacaagggtgtcttactcttttggaatttgtcttattgtcctaactcagcacattgtcctggtctatgaaaagtcctagaaacccttctaccctctgtaatgtaggagctttaactcaatagggttttttaaattcttttttcttgtctttttttcttttttaattttttccattttttcaagtcaaactgaagaaatatttttcttttctttctaggaatgcatattcaccccccaaggccacttgtctcctgattggagagtattagacaattctcaggatttctttattttccttctttattccataggattgggaaacccagtaggattgggtttaggcatatctctaaagcaccatgtttcaacgttttgatgtaagattgtgccctatttcttgttcagttgctgccagcagatgttatagttttaaaactagtttttggtcattgagatattagaggagggaagagtctgctatcctgctttactcatcttcatctacactacactgtcatcttcactgcaaagtcctgtattaatgtttttagattctataacattttaacaggtgtcaaaaaatcttaagcaccacttcagcttgggaatctctaaatgtaatggtgtttgtgggctggactgatgtctgcgtcttgttgttgttattgtctgtagtaatggagagccgggagatcctggacacttcctgttcatgggcacttgatgcattagctgccccagcagctgattacatttaaacaaggatgtgtgggtgaacccagggagaccaatctcagtggaatggtgggggcagaagccaggctgcagggtgtagagtagggaatgagcagtgatgaagtagaaacagagtttggacaactagtgaaactgcctggaagagggggagaagagacagtaaatggtctgaccaatgtttgaggtcaaagtgggtttgtaatctttatttaagggacagatctgagcatttaaaaattctgaataatctaatagagaggaaaaagttgggactcaaagaaaatgtgggaaaaaatgatgaaggttaaacggaatgagatccagagtgcagggggagagattagcctttggtgttagaggagcaactctgtccatggagagaggaaaaatgtagacataccacagttgcatttgaagttggggcctgaggagttgaggagttctgagaaaagcagaagatgagatcatttcctgagagtaaatgggagtcattagaacgggggtgaagagactggaagctttaggtagcttgaaatagttgatggaaaaattggataaagtgacaatttgtcacactcagaacagctatcagggaatctagaagaatctctggaagctagttgaagatcttaaattaccaatgtatcttgtccacatagctaagcggttttacttatttttatttttttgaaacagggtctcactctgtcacacaggctggagtgtagtagtagtagcacaatcacagctcaatgcaatctctgcctcccgggctcaagcaatcctcccaccccagcctcccgggcctgggactacagacacacaccaccactcccagctatattttgtacatttgtagagacagggtctcgccatgttgcccaagctggtcttgaactcctgggctcaagtaatctgcccacctcggcctcccaaagtgctgggattacaagcttgagcccggctgctaagtggttttaaacagctgttctcggaaacacacactcaaagaaaaaatgtagaggataatttatctaaggctggggcttcaagagaggtcagggtgttgacaagagaatgactaagtggcagactactggatctcagctagataaagagggatgtgatcgtgggaggggctgatagtcagaggctggaaggcttgatgaacaacacatattacacaaagaataaatggagtgagagaaaccaaaggagtaaaagttgtcatcagaaaagtgagaaattttattgtgagaattcagtggtaaatcaatgttaacaaacctcagctgggcactagtggagtgaaaccgaaggccagggagttgagttaatgagctgagacttgggcaccagatgggggtccacatggacaactaagccaccaggatgatgtgggaaactggggtgaatagaagccccttatccatgtgcacaagtcttgaataaaataggggcaaccaggcagtcagtggatgatagcagtgaggtggagcagagagcaatgtagttggagaagtggagcccacagcagtctcctttatatctagaagggaattaatagccaaaaaatggcaccgaggccaaggatgtcaccttctgactcccaaatctgagacagatgtgagagggaaggagtatcctcaagggacaggagatggtgcgaatgtttttggcataaatcaaagatgtcagggaaattgtcagaattcaggttccagagacacagaggaaaagcgtgggagaaagtggaatattgggaggtgagattagggcagaggaagcacaaatcaaagaacgaggaatagaaaaagtcatatgagctgaggagttggccaaacatgacagaatgggaatatgatggaattaagtggctttatgtgttccaaaaggattggtccacgcaggccacaggaaaatgggaggtaagaagaaagggatcgaaatgctgcaaagtgtattacttcatggtaagcaaaggactcaagactctagaaaatgatgcccttccttccaagactatgttagtccaaatctttcaagatacagaacccaaggtggggtctggcatacaagaagtataatagaggaaatgtctgtgacatttgcaggactgcaaagggagccaggagaagctgggaaagccatgagatcacaagcaggtctgactccaagtgaaggagatggggaatgacgcaaggtttggctgaagcatgtgccaaaggcacccatcagaggagtccctctccaagggatgggcctatcatagtgtccctaatagtgtcatggagtgggagcagcccacggagggcacagccttggcatgaacgcagacatgggtctcagagtgcagcagctgggcccctcagtcaattaggctccctcagagctggggcaggaggtgcactagaccacacagtaatatttatttattattaatttaattaataatattaatttattaatttaattaataatatatttatttatttattattactagaccacacagtagtatttgtatgtctaaggaagcatttctcagaatatactcactgaacttttagcctataagtacctgtatgaaaattttaaaaggggtttcatgatcaaaacattttgggaaacactccataccctttcttcctcatgaaggatcataatgcctattagtatatgaagggctctgagaagtcctgtagtaaagaaacttgctttagttttttagtccagcaatttttcaaacttaaatgagcaatagcctcccatccttttttttacactttttagcatactgcggaataaactcaacatgcattgagaaagactgctttagggaatagtcaacactatttcactcccagtaagtacatataaaatctgtatttccagggtggattatcaacacagctgtattttagaaatattatctgccctcccaggtatcacagctactaattattgggtactgaggtggaattttagggatcagccaattatgggaaagaaaatctgggggcaggataagatggtctccgaagccttaaaattatatgccattatttacctctttgatctactactcaatatcaaacaactaattcagaagaaaattgattgttttctaaaagtagtttttctacatttcccattaagaagcagtggtatttaaaacttataatggctattatgtgagattatcactatcatagtttttctctatacaaattttctgtaacattttatttgctaataaaaattagatagatggattgactaattgataatctaagaaagattatatttgaagaagccatagtaagggacagattaaattatcatcagtctaaacattctaatacctatttctctttttttgaaattttccaaatttgttattatgcatttaaacaataattttttgaacttttattttaggttctggggtacatgtgaaagcttgttacataggtaaccttttgtcatgagggtttgttgtacaaattatttcatcactcagctatcaagcccagtactcaataggtatcttttctgctcctctccctcctcccaccctccagtctcaagtagacctcggtgtctgttgttcccttctttgagttcatgtgttctcatcatttagctcccacttataagtgagaatacaaggtatttggttttctgttcctgtgttagtttgctaagggtaatagcctccagctccattcgtgtttccacaaaaaaacatgatctcgttcttttcatggctgcatagtattccatggtgtatatgtaccacactttctttatctaatctgtcattgatgggcatttaggtttattccatgtctttgctactgtgaatagtgctgcaatgaacattcacatgcgtgtgtcttcatggtagaatgatttatattcctctgggtgtatacccagtaatgggatttctgtttttagctctttgatctaatacctatttctcaagatcaagttagatctctaaaaaaggcatcatcctagcatttccccatcccttccctgaactaaatttaatgttgtgtgtatcaatcagcatacagtcaagacagaaaccacacatgaacattaaatataatgagttattaacttataaaagggtatgaactactaaagggggtaaggagaatgctgaagaatgcaggaatggcagatgtagagagcagccataacctctaagctaaggcacagcagccaaggaaggggcgaactcaaaaaatgccctccctccccagctgatccacccttgttggagggggtgtggctgcaacccaatggatgcccaagaagtttgcagagttgtggcaggttggggctgctgagcaggaaactgcccgaaggggtaccagtgagattcccaagaatgtgggcatgcctctggcgaggaagacgctcttggagtgccagcaaaatttactaggaagctacccagtagggtgccagcaaaagtcagcaggaagccactgtcgtggtgtcggcaaaattcactgaggagtgggcactgcagggtctccacccagcactggcaaatcagccaaaagaacaaaaacaaaataaaaacaaatcccagaaccagaaagaaaaaactctgcctcttactgcgaccctcttatgccttctacagcaactggcaaaggagaaatgtttatggggtccagctctagactcacaaagcagaacacagaagagtgaatgaagagctgaaaggcgataaatcagtaactggagcctcacatcctttgccttttttattgagggtcaatatattaagaagaatatgtctgcgtcttcggtaaaattattgctaaggttatcacccagtgtgtgttttcaacctccctgatataagaacttagtgacaagaaagaatgagacaatgatcatgaactattggacccaaccatttgtggctttagtgcccatcttctcagcaaggctttctctctctctctctctctctctctctctctctcttttttttttttttttttttttttaagatggagtctcactctgtcacccaggccggagtgcagtggcacaatcttggctcacggcaacctccacctcctgggttcgagtgattctcctgcttcagcctcccgagtagctgggattacgggcacccatcgccacccctcctggctaatttttgtatttttagtagagatgaagttttgccatgtcggccaggctgttctcaaactcctgacctcaagtgatccacccacctcagcctcccaaagtgctgggattacaggcatgagccaccacagccagctctcagcaaggctttttctgactacactatttaaaatgtgatccctgagccaccttggcctctcttgctgtccttccctgcttcgccttctccatagcacttctctcctactaatctacaatttacttgagctctgtgaaggtcaggatttttgcctattttgtccattggtgcatccccagcacctggaacagagctaggcacaggctaggcactctagaaatacttgctgaataattgaattaagtaaatgagtgatctacacgtagtggggaatgagagtatacagtgatagttccttcgactaaaactggggtcaaattatagtgataaagaggaactcagaccttcagaggtaagctttgtggaccacttgccaaggctgcagaatgtgatgtcgtttcacaaacaaggaggccctattatggcttcagatatgagaataataaagagaactttcctttcgcctcaactgcagccttctaaactcttccttccttcctatgtagaagtttcaaggacctcatggcctgagtgtggataggcagaatgctgggaatcaggcaaaaataaaataatactgaaagtgaaggtcatgctaatattagtaagccagggtgatcctgaatttacaaaacatttttctttgggaaatttcacacctcacatgattctgtgtttttacttgggaaatttcacatctcacatgactctgtgacatgcggtacatgaggtgcctgactgctgtttttgtcctctactaatgaggaagagtgtgcgtactcccagcgttttgcaagtttcaaagtctgacttgactttccttccttttcctggaactgatccatgagtatcgagagtaaagctgcccgcacctactcattcaagatcctgagtgtcctgcccagctgcaggaggtggagagacccaggaggaggggccactgctgatcccaggctgtagggggtgggaagagtgtcccagggcaccatgacccccactcactcactcacaggagacccacacaagagaggagagggcacttacagcttaggttcccaccagcaccaactcctctgccatcaaacatcattgtgtttctctttctgccttgtctgtcggcacacgtggagttaaatttaatgctcaatcacatatttgtctgggctctttctgtgtttatttttctcttaatagttctctctcctcccttcctctccccgcccctcctcctccttcttcttttttttttccagagacagtgtctcgctctgccacccaggccagagtgcagagtggcatgatcatggctcaccgcagcctccaactcctgggctcacgtgaacatcccaccttggcctctggaatgtctgggattacaggcacttgccactgcatctggctaatttttatattgtttatagatccgggatctcactatgttgcccaggctggcctcaaactcctgggctcaagcgaccctcccacctcatacttctgagtagctggggctgtaggaatgcgcctcagtgccaggctagtttcttaattttctatttctattttgacaggtacaaattttgtattcaatcctacctcagacacatctttggtgggaaaaggatgtcatttaatcaatatataaattctaagcaaataggtctgatccccaaattaggttagtcacagctgctgagtcgttgacccaagagaagctcatctagattttttcattattttcaagttcctcttctcggttcgtccttcttccagaccatgccctccccgtcccactctcttcccacagcctcccctccccacagcctcctcccaccattccaaatctgggctgttctctcaatttccttctctctggactcaaacctaccctagcccccagcctcagtttggggttaaacttgtcctcctcacattctctcccacccaacttgatgtcgcctctgtgtcatcaccacgggattttcctcctctgggttctccttttccgagtggggtcagctcccccatgagtcacagcaccaatcacttctggctgcttgcaaacccctttgctttcctcagtgttgacacccagggcagccctatgctcactgccgctgagaccccacctctgcccctggccttttcccagctgacatcaccctgtggcttccattttcctaaaattctcttttgaggcctcagtcttaaccaaagcacacagtgcccctcaaaaatgacaataaaaacccaaacacaccgtgactgtcatggcaggttcctggtccccgtattgaatcagcgggtgggtttctgcgaacactggtgagaggccgcattagagggtcaggaccctcaggtctggactcgtggtcaccacataccttcctccctgctgacagtagctggtacctgttacctactcagagtgtcacatgccacaagccagagcgtcttggcagttctcagcaccttgacatcacttccttgctaccactcagagcggcagtgacacagttcccttatctcagaaggccagaagacggctgtcaaaggtcacagggaaatcaaaggcggggtacagggccagagggaggaggaaacaacttcccggttgctttcagacgcttcagagatcctctggaggcctgggggagcttttgagtactttatttcagttggtccctgagctcggtgagtggggcgggtagagccaccaggggaatcaacagtggtttctcgtgcccctcagggtcaggagcagtctgatcaaaaggagggcatccactgtccggggccattcccacagctcccggatgctgggtctggaggctgcgcccttcccctgcaggagctcagcccagtggtaagtcatctgtgtgtcatctatgtatttaaccccttatggccatgttgatgctgagcatggtttcacttttgcaaacatttatttatacccttcgagagaaaaacgtctcagctgtcacaggaagctgcttcggggggtgagcaaactttttaaaatgcagaaattatgatctacacccgtttcttaaaagtaagccatcgtacttggttctctttaattatatattttcttacatattgtgttcatgtaggcaagtcctgtttctgctaaaagaaggtaagttctaccaaggcggtgtcatgccagctttatttcccgtggcacctggcacactgctaagcacttacatgcttaacaactagattgggaatggtgctgctctggggaagtgggcacacgttaaagaaatgtttatttcagtcttctgaaatagggaattactctggctaaaatgtagctccagaaagggaaagtggggctgtatgaatccaggtccagtttgttgtttcctccaggataaggcagctgtcggaggggaaaatcatctcccatttctccacagggcagtctgaagatggccaattacacgctggcaccagaggatgaatatgatgtcctcatagaaggtgaactggagagcgatgaggcagagcaatgtgacaagtatgacgcccaggcactctcagcccagctggtgccatcactctgctctgctgtgtttgtgatcggtgtcctggacaatctcctggttgtgcttatcctggtaaaatataaaggactcaaacgcgtggaaaatatctatcttctaaacttggcagtttctaacttgtgtttcttgcttaccctgcccttctgggctcatgctgggggcgatcccatgtgtaaaattctcattggactgtacttcgtgggcctgtacagtgagacatttttcaattgccttctgactgtgcaaaggtacctagtgtttttgcacaagggcaactttttctcagccaggaggagggtgccctgtggcatcattacaagtgtcctggcatgggtaacagccattctggccactttgcctgaatacgtggtttataaacctcagatggaagaccagaaatacaagtgtgcatttagcagaactcccttcctgccagctgatgagacattctggaagcattttctgactttaaaaatgaacatttcggttcttgtcctccccctatttatttttacatttctctatgtgcaaatgagaaaaacactaaggttcagggagcagaggtatagccttttcaagcttgtttttgccataatggtagtcttccttctgatgtgggcgccctacaatattgcatttttcctgtccactttcaaagaacacttctccctgagtgactgcaagagcagctacaatctggacaaaagtgttcacatcactaaactcatcgccaccacccactgctgcatcaaccctctcctgtatgcgtttcttgatgggacatttagcaaatacctctgccgctgtttccatctgcgtagtaacaccccacttcaacccagggggcagtctgcacaaggcacatcgagggaagaacctgaccattccaccgaagtgtaaactagcatccaccaaatgcaagaagaataaacatggattttcatctttctgcattatttcatgtaaattttctacacatttgtatacaaaatcggatacaggaagaaaagggagaggtgagctaacatttgctaagcactgaatttgtctcaggcaccgtgcaaggctctttacaaacgtgagctccttcgcctcctaccacttgtccatagtgtggataggactagtctcatttctctgagaagaaaactaaggcgcggaaatttgtctaagatcacataactaggaagtggcagaactgattctccagccctggtagcatttgctcagagcctacgcttggtccagaacatcaaactccaaaccctggggacaaacgacatgaaataaatgtattttaaaacatctatttaatgtattttaaaataatttgtaagttgattttaaaaccaatttaactacattccaaattatagacagcccatttatatgggagtaacttttcaggctcattgcctcgccggtgatgagaagaactagctagctggaagctgtgggaaaaagaggtaaggtaacttgttctgtcgaagttctctaaattctcttgcttacttgccacacccctaggcccccagcttcccctaacccaaggtttctggtattttctcgtactttatcaagactatggaatcttaggagacttaacaaaagcaaatgagaaattatgtttagaaatgtctaacaaaatgaattctttgtccttttaagtataacacatacctcaggcctcaccagcacataactacaaaaggttgtcccacttcctttctgtggctgagttagtagaacacaggctcccacctgccacatcagcagaaggtcacctcaacatgtgagctacctccccggagaccccccagatccgtaaggatgatgcatccttgatcctaaaaacattttcctgttcctggtgttcagaattggactccacactcactggtctctttataatcttgcttctggccctttgaggcctcaaagctaccagggccttgctgccaggggacaatcaccgctcccggctgagtcctgcagacatagggcctgggctggctgcctcctcctgctggcccagcatcttgcttgcactaaagagagctggaggcttggcactgatgcttgctaaaaacctacccaggccgcccactgctgccgcactgcagggcaccagcccacactcctcccctcctggcatcaggcacacgttcacggcactaaaccttacaggaaagcagtggaaccctgtctttccttcacaggaggcactttccttcctaggcaaaaacgatgatacccatgggcacagcatctcacatagggacacatagagatgtctgactcattaaaacccaagtctctggccaattaaaaggggtccttaatgtcctactcaacagtggtggaaggaaatttgctctatattgatgaaatgaggtggagaaaatctgattttccaaacatgagaattctccatatgccaccccataaccaaagaccccttatttgtgttagatgaaacattcaaagagcctattaggatagcggatgagacccccaagggacatgcttatacaacaataactggctccaaaccacactccatggcagtggctctcaaatgccagctcacatcacaagccctgtgctaaaacacagagttctgggccccatcccggagtttgtggttcaggaggtctggagtgtgacctcagaatatgcatttctaacaaattccccaggggatgcagatactgctgacccaaggccctccttctgagaaccactgttccagggagaagaaactcagctaagtaagggtttggctttgtgctgaagacaatgtggaatttagagttggggtgaattattcaggaaagtagagaggtttggagatgtgagggtgggaagcgcagtggagggaggcagagaggaaatatgaagcagcgtcagttggagagaaattaggaagaggaataaaatgatatatgccagggatttcagttttgctgagcccatgatgacagactcttctctggcaccttatgccactcattgagggcttgtagctggctctgctctttcagagtcataatagggctatgggtctgacctcaaggtgagctggaatgggcacaagtaatagataaaactgcaagaagtcactcaagggtccttcctagaacaaaggatccctacattccaaaggcgaatgccggtcactatcataaaagaaaagaaagaaagaaactgatggtgacattttaaatggcaatttttctagcttctaaaaggttgtggagcaactggaactttcataccctgctggtgggaatgtaaaatggtataatcactttggaaaaattggcagtgtcaccaaaagcaaagcctatacctactatccatttcactcctcagtatttacccaagagaaatgagcatgtatgtccatacaaagatttggacccaaatgttcatgacagccttatttatatagcctcaaactagaaaaagtctgtctatcaacaggtgaatggataaacaaatactggcctgtgtatctaatggaatactgctcatccacaaaaagaaacgagctattgatacacacaggagcatgcacgaaatctcaaaatgctgaatgaaggaggccagattttaattttatttttaattatttatttatttatttatttttgagacagagtctcgctctgtcacccagcctggaatgcaatggtgtgatcttggctgactgcaacctctgcctcctgagttcaagcaattctcatgcctcagcctcccaagtagctgtgactacagtcatgcacaagagcaactgactaatttttgtaattttagtagagacggggttttgccatgttggccagctgctctcacactcctgacctcaggtgatccacctgcctcggcctcctaaagtgctgggattacaggcatgagtcaccgtgcccagccggaagccagatattttttaaaagtacttattttgtgattctatttatataaaattctagaaaatgcaaacaaatccatagcgacagcaaatcagtggttgctggagatgttggaggggagaggagaggaatagattgcaaaggggaacaaggaaattcggggggacagtggatatgtctgctattttgactgtggtgatggtttcattggtatatacatatgtcaaaaacgtaacaagttgtatacgtgatttattatgtgttgactatacctcaaaaaggctattttttaaaatccccctcaggctccaggcactccattacgttggtgtgacttgtcttggaaatatactttgagcatttgccggaggagatccagtgcctgggcctctgtttcttctcccaagtagaattggcagctaaaacgggatgcccatgggcacaacttgtcacccccatcaccgaacagggagcagaaggaggctgctgggggtgcccccacagggagcacagtctcatcgggaatgacctgccatggcaaataaaatcaccagggcaagtcaagggagagaccagggaagagagtgatccagtctatattaaaaaaggatgagaaaggttgaagaaaaagagaagaagggacagaaattctcttcacacatttgcagaagtaggtccggactctccatccacttctcctcctccgataggtaggacaggaatctcagaggaaatggcatcatcttcccatgtttacagacacagcaatgaactcaaagaacaatcttatcaggattttccaaatgaaaacatggagcatatagagaataaagatccataaactcgtatggtggctgagactgaaatggttaatgaaaagcaaaagtgtgtgctgaatgacaccagccacaatggcctgaacacttaagtagtgtaatatacttggaacattgacagctaacaaggtcttcctcccatgtcagaccaagaacacagtttcctaaagataaaaatagcacatgcttttccacttttccataagtgactgcattagaaaactaacaaaccatgaaaagcaaaatatggctagtctcttcaagaaaaactggtgtttctattttgtctgtaaattactttctaatacaaaaaacaattcctgttacattgaggtaattctaactagggacatatgagagagagattgaaatctcatgagctgtctccttttcatctcaattctgtgtactcgtgggtacaaatggaactagtttttgtttgtttgtttgttttttgagatggagtcttgcgctgttgcccaggctggagtgcaaaggtgtgatctcggctcactgcaacctctgcctcctgggttcaagcaattctcctgcctcagcctcctgaatagctgagattacaggcgcctgccaccatgcctgactaattttttttttgtttgtattttttagtagagacagggtttcaccatgttggtcaggctggtctcaaactcctgacctcaggtgatccacccacctcggcctcccaaagtgctgggattacaggcgtgagccactgcacctggcccggaactagttttaaaacaggaaacagttgatatactgaatggaaaaacaatacaatttgaagttgaaaaaacaaaataagatgcccagttaaatttaaatttcagttaagcagctaatagttatttagtataagtacaacccatatacgacaattgcagtatttgttatttatctgaaattcagacttacctgggcatcctagtatcctgttttttgttttgttttgtttttccctttgttttcttttttttccccgaaatctgaccaccttaactttaaggtatttattcatttttaaaaactaaatatttttcggcagtcagaactagagcaaagataaatgatcccaggactctgtttagcaggcagtcaggaagtgtgacagtgtggtgggtggcagccccggccaggcctttcctcttccctaaactgccacagcaggactgccacacttgggaatcccagtttccatctgagcagcccctccagagtttggaaggagtcagtgctttagcctgaggagccgtggatggctctaacactttgcttgtcggttgaataaaaatcaacccaaaggtggcctacactcattgaagtaggaatgccagaacttcagtggtgtcacatagaagaaaatatctaagtgcttagggagatggcagtgctagtggatctactggatcattaagactcactcacccacccagcgcaggtctagaggacacacccttgccacactgggaagtgtaaatgagctccagcatctttatttttttttattttttatttgttttattatactttaagttttagggtacacgtgcacaaagtgcaggtttgttacatatgtatacatgtgccatgttggtgtgctgcacccattaactcgtcatttaacattaggtatatctcctaatgctatccctccccccgcccccggtgtgtgatgtcccccttcctgtgtccatgtgttcttattgttcaattcccacctatgagtgagaacatggggtgtttggttttttgtccttgtgatagtttgctgagaatgatggtttccagcttcatccatgtcccgcatctttaaaaaaaaaaaaaaatctctaagtggtggctcttctctgtagatcaggagctgtagtgagcaatgctacaaaactggagtttctaaatacaggggggatggtgggattctgaggaaggacaggccacgtggtaacacttacaaaagaccaagtgggtgtggttgccactgtggacggtggagccaaagcagtcctcagaatagtctgacccccagaggtctttggcattggctggttgatcatggtgtccctggaattgaaatagaaggacggtctactaaatttttacctgatctgtataagcagaagagttctatctctagtgaacagaagtctaactttagtcaccagaactgagagtcaattcaatcaattcccagatttgacatagtttatagacctagaaccccttgaatgaaaggtaagctggctccccttgaggaaggaccctgttacatttccggcattttattctgataatcttttttcccagccttccccaaagcaacttagggccatttaccagggaaagccatggaggaaaaggaaataattaggctatttggagattccaggacactggctctacgctgacaccagttctaagagacccaaaatatctttgtggtctaccagccaaagtagggcttcatagaggtcaggggtcactagagtttgagctcaggtctgtttcactgtgagtctagagggtccctgaacttatcctatagttattcccccagttccagaatgcagaattgagctgagagcagtggctcatgcttgtagtcccaacactctgggaggcgaaggtgagaggatcacttgagccaagcggtttgagaccagcctgggaaatatagtgagaccccatcttttaaaaagacaaagaaaaataaagaaaattgacatggaaaaataatataaaatgtgaataatctcacatctactaaagaaattcaatctgtaattagaactcctcccacagagaactataagcccagtgcccccatcaactggagaaacagaaagaaacaatcttcttaacagaaagcataattggaatagagatactctgcatcggggaagaatccccatattgattctctgatccatagagtgaaggccaagtggaagcctttggaactccctctacctgccaagatactaaacaaaacaacactgcacgtctggaggaattgtagcaagaacttgaaagatgaaggatgatgatgtccacctctctccattcagctcacctatctggtttgtgcagaagacaaataggtgttggaaaatgacagtggaccagtgtaaacttaatcaggcgggggctccagctgcagctgcaggatcaggtgttgtttcatttctgcagctaatcaacccttctcctggcacctggtgtgcagatggcaatttttcttttctattatctgttagtaaagactatcagaagctgtttattttcagttggcaaggtcagcaatacactccaagggaagagcagtctgtctcagatcttaccgatgcctggggatagggagggagtggccccctcaccgtctccaaggcctagtcctctgctcctgctactggcagcaaatccacgcaggtctgcaacaacctcaattcctgcctcctcagaagaaagaattcaattgagggacgtaagacagaaggagagactgaggcaagttttagcacaggagtaaaagtttatttaaaagctttagaataggaacaaaaggaaggaaagtacacttggaagagggccaagtggacgacttaaaaagcaagtgcgtggtttgaccttttgacttggggttttatacgtcagcatgctttcggggtcttgcgttatttctcccctggttcttcccttggggtgggctgtcccatgtgcctgcctgagcccactggctcaactcctgagatcttatagggaaactactgctcaccagtttcgagtgttttctatctattaggagccggcttttccctgttgccgggtgtgaccaattattactttagaaagacagtcaacaaccgccagaccatcacctgatggtcacctgacactcctggtgtgtggggtatggggagccctctcctgccctgctctttctgactagctacccactataacactcccagagggacctgcacattttgtgctctttgcaagacagtgcctgcccagcacctgtaggcctgctcaccccttcagggtcatgatttttgctttttaccgcaggtacccataagcaaaacatggcattgttcaccatgcttttacattattcacataattttaagttatttacacaacaatgtaaaaccatggtgaaccatgccacatgttgcttatgggtacctgtggtaaaaatcctgctactagctcattttgcagtgtctataatgacaggtaatgctccattcactcctttatgacacttgcaaaaactgagaacataacgcctcccagttaagcaggcatctgggcaatgtgaggagaacagaaatagaccacgctgcatttatctctcttgatgacaggcattgagatttccactttttctggtttcttattatgtctctactgggcattcttacatacatcttgcacgccatggaaagtttctctagggcagtggttcacaaactttttggatacagaatacttttatgtgcttgaaaactgaggaccccatacagctttagtttatgtgggtgtaaggttctagcccaaactgaagtccgaagggagttggtgggtgggtgaggggtagctgaaaaaacacccgaggaatcataggcagtttgaacatggccttatcctctctctgggcacgagccatatgtccagtgtcagcagggtaattataccttttacagacaatagaggctctgaagcaatcacgagctcacgtgagtggtcacctaatgcacctcaagtggcatggttcataatgtgcggagtcgtgtgcctacgctccaaacccactgagtcatggtgcaccaaaaagtggcctcagcctgctcctgactaaagcgcagccatcttccttacactccacccctaggccaggggcatcctccaggtagggacatgtgcccgtagggtggagccctgaatccataatccacagcaacaatacggagagcaacagctcatgactaggattccagctatgctacttatgactatcagggcccagcgtaggccagagcccagggatgtctaccatctctgcagggggtcatcagtaaggctcttgactaccttaatctcctgtgagaccccttgcagggctgctgttatgttctgccaattgtcagggataaaggtacaacattgtgttcctaaaagggcacaggtgcctccttaggcagcagttactatgtctaagaccattcggtttcgcaacaccacctttctgatctgatcaacctcatccattaatgggaagagggccactcaggtgtaattcagagcctgagcagcatgctctgcaagagcagtaacttggcttctacagttgtgacacacactccagggctagtgcctgtcaaggggtaaaaccaccagggtgctcattacacttgcaaaaaccgagagtgtagcacctcccagttatgcaggcatctgggcaatgtgagaacagtggcaggtacatgaggccaccctcaggtataatgtccagtccagtttgcttataggtaaggccaccctgtgtccccacagacccataaactcccagggggcacacagtccatcgaggccccttggtggggccgcgtcttccaccatacctttggtgtggtgacatgtattatgcttacacacactgtgacgggtacccatcccacagtgctattaccccagtgttgctatatgcaccacagtgcctgggccaggggtactgcacgttacctcactagccagccccacccatcataaatgctatgggccagccagggaatggctgtgctgtgggtcttgtggcatcctttgtccaaaacttgccacgttgcgttccaggcatcagccatgggaccccaagtctccagccatgtctggttctctgcagatgctgaatgtatgtgctaaggcaagccatctgcagctgctagaagggcggtgcagatccaacagttggaaacattggtcacttcagtgtaggtgtgggcccagtccacaatgcagttggagcatgttaacctacagttggaatgacagagtaggcataggtactaacagaggaaaatcacatccctcaggtaaaatacaggctaacctttcatccctggataacaatgcagcccccaaggggttctgccctgggcaatagtaccacaccttttcagctccccatggttcctttgggtcctgtattcatgcgaaagtcacaggggagcttgtagtaggccacacagacagtacatttgaaccctggaggaaagtttcttccctggccgttttcctacaaacagttaacttcggggaccattcattgaacacccaaagagtgacatacaagtcatactgtaggccctccccacagggagctacgatggacaaccaccagcagccgggggcttggaggggctatggccacagccaggttttctgttcccctgccttcagggacgttggggcaggcaacaacaggttactgttcatccccatacctggtcagaggcggttacccttggtgtgtatctgcaactgaataggggtggtggcccatgtaacaaagcctccacctgggctgggctgcttttccatggccattcattcaaggtttggagcatcaggtccagcctggaacttcagccctgcaaagacaggagtgtgacatgcaagtaaaacccattcttcaagagctcgctatatcactcaatcatacccacagcttgcaagttgtgcggtacatggaatccctactttatgtccattgttgtgcctgttgtccagtaaaatgtgtcccccatcactctcaatgaccaaagggcaaccatatagagcacataagtgttgcagggtctggatggtgtgctgttggttggccaccctgcaaggataggcaaacaacaggcctgtggctgtgtccacagctgttagcgcatgagtatacccttgtgacttcggcagcagcccaatgtagtctacttgccacctggtcaagggcacttgccctgttgtcacttgtgtagcactggacagctgcctccatttagggtatgcctgagcacatgccgggcatttctgacaagcctcccaaatgtcttgcatgggcagagacagaccccaacatttattgacttgttgcatcagtttaccccctgcatgtcccagtttccggtgtagctacaaggccacatctcatgtagatgccaactctaaccatcggaccttggccaaggcttctgcctcgtcattgctgggggtggccagaggcatatggcctgacaaatgataaatagttacatctttgcaatgacccatttcccagaggtcttgctacatgggttggtggccccaaatgggttggtggccaactagccaattctgtattttccaagtagttaaacacaaagttaggcctccatagactgcccagctatcggtacggattaccataggtgtctccgccttgttgatcaccatccatactgctttaaattcagcccattgactactttgtccacatctggtttcaaaccatatggttttggtactaagttggactgcaacactggtccaagcaggagtagcacctcgactagacccatctgtgtgccatgccccatcaggaatagagggatgcccttccttaaatggcagtggctcagggtcaaggggtgcctcaggccccatggccttctcttgcattaggactgcaggtcccaagacctcttgcaactctgctgctaatgggcttgtgctcagcgtactctgttgctccaagtaagtgcctcactttgccaaagtggatgtctgcaccatcccagtctggggggtcattacacatgaatgcacccatcccgctgtcaggtaagtcatccacactgtgactgtagcccatcctatcacttctcacaagcctgaagggcagcatatacagctgctagctatttctctatcaaggaataccagagctcagctcctttccatagttgggaccaaaagcctcctggcattctcaggcactctgtgtgctgccacaggcccaaactaaaaccatctgtggtcacatgcatatccagttcaaatgggcaccccttgtcaaatacccacagggctcgtgcctgctgaatagcccacttggctgccaggaagccagtctcagccacatcagcccaatcccagattgctcccttctttgttaactgatacaatggttttatcatttgagctaaatgaggcaggaatgtccaccaatatcccaggaggctcacaaaagtttgcagctgcctcaccgtggtgggccagggatatgcctaaattttgtcaatgatagcctcttgtatggccttcatcttacccgaccagataactcccaagaatttagcaggtaatccaggccctcggaccttggatttgttgatggcccaactgcatgctgccaaatgttgccacaagaggggtgccactgcttctaaatctgcaagagaatcagaggttaacataatatcatcaacgtaatggaacaagtggactccctttggacattttcaggctgttaaatccatggcaacaagaccatgacatatggtggagctatgcacatagccctgcagcaacactgtgaaagtccattgtcatcaaggcaaactgttcctggctctctagagcaaggtcaactgagaagaatgcattggccaagtccaccacatagtggtactgtcctaattccattgtcgagtggttcatcaaatccatgatagatggcacagcttccaagccatgtaaaatatccacctccagaatgtattcaggtatgggagagacatacacagtgtataagcaaggagccaagtggccaatgccaaggtacagagatacaggtttcactttcactgactggcctccgtaacctttaatatatgcagatttgcccaaaaacttaactgggttcccataaacaaggctacaatctatgccagtatctaccagcaccagcacccactgtacattggtgggggaccagtggattgccaattccacatgtggcctctggtcatctggtgtccccccaagccagacacctttggccagttccctagttgaacagaaaaggctctacatttccacctggctgcagcaagtagtctctgagctgggtaggaccaggtcacacagcaatgcctttctcccctttgggcattttccggaattgctgccctgcatacaactgtctccgcaaagttaggagtatttcattgggctgcttatcaattttctctcagtcaaccccagccaaaatcaaatctatccacatctgtgagcgtgtcactcgttggggccccctttttttatgggggagccccctgtgggtggggtaacttccccttctttatggtgtggaccctccaatccccctgaaggccttctgcttccctgagagccgccatggcagtggttacttcatgtatgcggtgccctacgtatggggtgaggacagcagctagggagccaaaggggctcaggagcatcaaacccaacatgagatccctcatgtgggaggtgaaacatttatcatctggccctcaggtattcaggacaaacatagcctgccgcatacccatctcccgaatgacttacaccaaattggcatatgactgccatttactcacagttttgggcatttcaccagcattattccacacagttcatatggctgcctgtagccactcagtcagggtgtggtctccttgcgctgccactaaccacctgctcacttgcagccgctgacagagagaggggtgagtcatggtggaggccagcttgtccatctcagaggtggaatgggagataccatctgctcccttgttccacagacgaagcatccaggcaggcaggggttcccctggacactggcaacactgcttgcctaattcctgcaactcagttggggtacaggcaatatacgaaatgtgttgcattatggtggggagtccctgagtccacccttggagccccagtggctgttcatgatctaccttctgtcagaccaccgggtgagcccgcaacaggggttcttcctccttggtatgaaactgagtggggatctccagacaagatgatggacccaggcctgcattcatggtagcctctaattccttttccaagctctgaagccacacctccaggcatcctgcctgcacctggaggtccccattcatggcagcctctaattattttccagatcggtgtagccagacctccagtctgcatccctcagggactgggtgtgtacttttcttagcacagttaaaaatgcccatccaactctgccagcaaaggctctctccttcttggtgctctgcacttccagctgcttcagcgccttctccatgctcatgggggacccatctactgccacccaggtttccactcaagcccaccctcacagcacggctaccaccgggtaccacaacccatgttgtggtcacatggccaacctggaatcagcagggaccgaaggctcacttaccttaggatcctgttcgtgatgccaattgtcaggttctagcccaaactaaagtccaaggggagttggtgggtgggtggcaggtaactggaaaaacactcgagtaggcggtttcgacatggctttattctctctctgggtgcaagccatatgtagtgtcagcagggtaattttaccttttacagacaatagtggctttgagccaagcacgtgctcatatgagtggtcacctaatgcacctcacatggcatggttacataatgtgtggagttgtgtgcctgcctccaaacccactgagtcatgctgcaccagaaggctgcctcggcctactcctgactaaagcacaaccatctcccttagagtgggctaaatctactgctatttatactattagaaattttaacacagaagttttaaatatttacattgttaattgattttgaaataataagcccattacaggttaacataattaacatacttttattaaaaatatctgtattttttaaaagaaaaaaaattagcaacaacagtgatccttggaatcgtcccacctcagcctcccaagtagctgagaccacaggcgcacatcaccatgcgagctaatttctatattttttggtagagatgggatcttgccatgctggccagggtggtctcgagctcctaagctcaagtgatcctcctgcctcggtctcccaaagtgctgagattacaggtgtgagccaccacttctggccagaagctggattctctgtcttgttctccatccaatctgttagactgtcaaatgccaaataacctttggaaaattctactcgtaaaataaggagagagataaataacttctgagtatcatcattaaaatagtttgacctcatggacccactgggtcccatgtggagaatagctctaagctaaagagtagaatggctgggaggggacataaacattcagcccatagctgctgaccacaataacacattttaagtctcttcctctcctgctccttgtgattgcagacagactcaatctgtaggagagctgtagagagaacaagctcaagcccctgattttgcctacaaagaaagctgagcccagcaaagttaagggacttacccaaggtcacacagccacacagcagagctggggctgagctccaggtgtcctgctacagaggccacttctttctcccactagggactggcctgtgattacttcagaaaacaatggtcagctaactgattctgaacgccctttgctggtaaaagctaatctcctgaggaaaaatgtatgcattggctgggcgcagtggctcaagcctataattccagcattttgggaggtggagacaggtggatcacttgaggtcaggagtttaagaccagcctggcagtcatggtgaaaccccgtctctactaaaactacaaatattaagctcggcatggtggcaggcacctgtaatcccagctactggagagactgaggcaggagaatcgcttgaacccaggaggcggaggttgcagtgagccgaggtcgcaccactgcattccatcctgggcaacagagtgagattctgtctcaaaaaataataatagtaaaataaaaataaataaacaaataagtatgcatcacctcaggtggtcagtcagctttcccaagaccccaaagcacacaatgttctttctggtatgagtgacatggggttcacagcaccacaaagtccatgacttttccctcagaagtgaatgcatggctaattattttgtattttttgtagacatggagttttgccatgttgcccacgctgctctcaaattcctggactcaagtaatccacccacctcagcttcccaaggtgctgggattacaggcatgagacaccgcatggcctgcacctatagtcccagctatcaggaggctgaggtgggaggatcacctgaaccggggaagttgaacctgcagtgaactgtgatcgctccggtgcactccatcctgggcaacagagtgagatcctgcctcaaaaaaaaaaaaaaagtgaacacacatgctggggaagaggcctgcaggcacccctgccagttctgcaccagagcacactgtagcagccctgctgtgatgcaggaagcagctccaggtcctgcagtctgaagcatggagcctgaagcctggagccccccatccaatgctgcgccatgctcaccagtatcccccagcatcagcaccgaggcaccagctgcagataaatttctcacctaaaatgttgagagatgttgctaaactgtccttctaagggtatgtataataatacggtcctgccgatactgaataagactatctgtttcattacatcctcacaatactgaatatcattagcaacttgaattttaaattgtgctaatcaatgaaaatgattgcctaattactagtgagttgaggttatttaacattaatactccttctgatgaaatattttgcatttatcacattttacataaattctctctatataattagcactagaatgtccgacttggttttcattgttcctcacctgtttggaaacacattaagaatgagggagagaatggatggggactcacctagggatgcatggagctggtcggcagccactctgaggccctcttaacacttccccaccacacacttaatttcccctggtttgtccatagatacatccaacaatttttatgtaaataagaaagactcagctttcaatggaaaatggtaggttggattttatgactgaagtggcaaaaagaaataagggattttattatgggggaggtccaaaccctggtgaaaaacgaaattcattgaaattgtttgaaaattcaaggattaaatcagattattttggattcagtaggaattagattactttaaagccccaggatactttattctgtagaatgcatggaaagtatagaaaagagaaacaaagagggaaagtcatggctaataacctggaaggggtaaatagggagccaaaggcctgtgggacgtaaccaactcagcattccactggaggctttatgatcaaatagcaagctatttatcatgaatgcaggatgtgggcaaactcacgactgctcccactgccagaaggtttgctgagggcaatcacttcctggcaccgagctccttgaggttatctactgggacatctggagaatgcagtcttgcaagcctactctggacccagcagctgaccccttcttccatgcccctcttcctgctatctcttttgcctaataaatatggagggctgtgtaaagctcagggcccttgtccactagaggcaaactgcccgctgaccccttcttccaaatatgctcttttgtctcatgtcttttattcccgctttcaccccactttgttcagtccccctagggccgtgtgggttacatagtggcgccctgaacagcgacagaatcaggtgctctacaagtggcgtccgaacacagggactatgaggatgtgaatgaagaagatctgctggagcagaggaattgaaattgacaaggtgaatggggatcccgggacaagtctgccggcagcagatataaggtcagtgccctaaagaggtactgggagcagtgccttaaagtagtactgggaatgggaagttttctgaatcagggtaacatggggcagaattggtctgttgaagaaaaacattatgtgcagttgcttaaagttttgttgaaacaaactggtgctcaggttagttctcacattaactacgatgctacaggaagtcattatgcataacccatggtttccacaggcagggactcttgatgtagaaaattgggatagagcagaaggattaaaacaggctcatcaaaaaggttttcaagttgattcttcagttttctccacttggagtttagttcgtactgtacttctgccattatctccttgttattctgcgggacagcaggctgaatgtaaaaatctgaaagaatctgttgtcccacccacagctccagttgaaaataagtaataggagagggaggataaaaattggcctataccgccccctccagttgcagaaacatctgtaccgcctccttcggtggcagaaacagagaccccaatacaaagaattttacgctctgccgccacggctggagagcccttaggaccttgcacttttcctatttccgtaagtcctgatccaaataatccacagcagcttaatcatgaacacattccactagagtttaagttgttaaaggaattaaaagtgagtgtggtaaataatggcatacagagcccattcactttaggattgctagaatctatgtttggtgctatgtgtcttttaccctttgatgtgaaacacttggcatgaacttgcttgtctgctagcgcatatctgacatggaatttaaactggcaagaacagggtgcagaccaggctagacagaaccatgctgctggaaatggagacattacagaggataggctattgggtaatggcccttattctgacctggtacatcaactagcactcacaaatgctgcttatcagcagtgcacacaggctgctaaatgtgcctgggccataattcctgaagagggagtcccagtactatcatttttacatatcatgcaagggtcacaggaaccctacgcacaatttcttgcaagattacaagaggcagtgaggcatcagattcctcataccttggctgcagaaatgctaacctttactctagcttttgagaatgcaaatgcagattgtaaatgtgcactggcaccggttaggtgtacaaaaacttgggaaattttctcagagcttgttaagatgtagcaactgagctttatcgatctgcaatgttagctgaagcaatggctaatttagctgttgacaaatctaaaaagagccaagggtcaaaccctaaaatgggaaaatgttataattgtggaaaaactggacattttaaaaaggaacgccaccagatctcaggacagaaaggatcttacaatgcttttccccccggcccccagcggaaagaacacctggactttgtcctcgctatgacaaaggaaataactcggctaatcagtgctgctcaaaatttcatcagaatggcacccccctgttgggaaatgagatgggggcctgtacccgggcctcacaaacaatgagggcattcccaattcagacctcaaccctgtttcaggcatgggttcccagaggcatattgagtccctcacccgaggaactccaggaagtgcaggattagatctcccagccagagaaagggttacataaggtggggaagacaaacccaccaagattctcactggcatttggggacctttaccagcaggatatatgggactaattttaggcaaaagccaccttaacttgcaaaggcattactgtagtcccagaagttgttgactctgattatgaaggagaaattcaagtagttttattgtcacgagatcttcgggtttttgaaccgagagaatacataatgcaattattacttattccctgcaaattacacccttctccatgaaaggagaaacaaggaaataaagggtttgggagcacagctacacgggaaatctatctatcccgacccatagcctctaatagacccacctgtgtagtacaaattaaaggaaagaaattttatgggtttatggataccggagctgatgtgtcagtgttaccagcaggtctttgttcttagagctcccaagatggcggcaagccttttgttctctgacctggagttcttggcctcacagattccaaggaatggatccttgggccatgcagtgagtgtcatagctctattagaagctcttccaaaagtcgtgctgctatctatggactaaaacatactcaaacaataatgacctctggcgtttaggctcaatgctcagagctaattgcagtcattcaggttttacagctcacagcttcagatcctgtcaacattgtctgtgttcagtttatgtcgtaaatgtagccggtcacatagaaactgctacaattaaaagtacgctaaacccagaactgctaatttatttttaagacttcaacaagttatttgttctagtgcagctccttttcatatttctcatattccttctcacacacaacttcctgggccgctatctctaagtaatgagaaaacagacaaactgattgcctctgtgtttcagcaagctcaaccatctcatgtgcttctgcaccaaaatacttccgcccttactcacatgttcctacaggtttgtattatattatgcagtatatccctcgagccacacctatagaaggatgtaatccacgaggtttggctccaaatgaaatctggcaaatggatgttacacacacagcaacctttgataagctgagctatgttcatgtgactatagacacttattctcatatgctgcctgctacatgccaaacaggtgagacagctggtcatgtacagcgacactgtctgtcatcatttgctcatatggggatatctaaacaattaaaaactgacaatggacccgcttatactagtcatgcttttaaaaatttcttgcagctttgggctataacccataaaacaggaattccttataatcctagaggacaaggcattatagagcaggcacatcaaacattacaatgcatgttgaaaagacaaaaagcgggtataggaggccaactaccacctcaataaaaactacatttagccttatttactttaaattttttgactcctggtatggatggtaagactccagcagaaagacattggcaagtgttagaagaaaagaggaaaatttatccaaaagtgttatggaaatccctggaagaaggaaaatggaaaggtctggtggatttactgacgtggggaagagagtatgcttgtgtttttacaggagatggacaagccgtgtgggtgccctcaaggtgtgtgcaaccatggaacgggagactagaggaacccagggtggccaaccatggacagggtccccccggtacgagccatgagccagctgagcctgagtgcaaagacggagagaaggccaactggagtcacaacacagttctaatgttatatttgtaaagaatatcactactcaacttacagtttgtgtttatagatatagatatagatatagatatagatatggatatagatatagatatagttatagatatagatagatatacactttaagttctagggtacatgtgcacaacttgcaggtttgttacataggtatacatgtgccatgttggtttgctgcacccatcaactcatcatttacattaggtatttctcctaatgctctccctcccccagcaccgcctcccaacaggccctggtatgtgatgttccctgccctgtgtccaagtgttctcattgttcaatttccacctatgaatgagaacatgcagtgttttattttctgttcctgtattagtttgctgagaatgatggtttccagcttcatccatgtccctgcaaaggacatgaactcatccttttttatggctgcatagtattccatggtgtatccttatgtctttttgacagctaagaaggaccagctccaggtaaacaatacccaattgacctgtaaatcttaccaattatatcactgcattaatcatagcacattgcaaacacataatatctctactttgatgattttaggccacatccctgggctatgtattcctgttaatctgtccgaggcttgggctgccacacctgctttgcattttgtgaaacttcttctaactgagcttactcatcatgtctgtagagccttagacataataattttagctattgtttccttggtcgcactaataacttctgttgtgatgtcctctgtagctttgcataattctattcaaacagctcagtacatggagaactggacacacacagccgaccaagcatggctacttcagaataaaattaacactgagttacaaactgaagtggtgttatgggaagtcagggaccccaaagagagggaccagctggagccacagcagaggaacgtaaattgtgaagatttcatcttaatacggatatttatcagttctcaaataatacttttacaatttcttatgcctgtctttaatctcttaatcctgttaccttcgtaagctgaggatgtgcatcacctcaggaccactgttataattgtgttaactgtacaaattgattgtaaaacgtgtgtttgaacaatatgaaatcagtgcaccttgaaaaagaacagaataacggtgatttttatggaacaagggaagacaaccataaggtctgactgcctgcagggtcgggcaaaaagagccatatttttctttttgcagagagcctataaatgaatgtgcaagtaggaaacatatcgctaaattcttttcctagcaaggaatattaatattaataccctcggaaaagaatgcattcctgaggggaggtctataaatggccgctctgggaatgtctgtcttgtgcagttgagataaggactgagatacgccctggtctcctgcagaaccctcaggcttactagagtggggaaaaactctgctgtagtaaatttttggtcagaccagttttctgctctcaaaccctgttttctgttaagatgtttatcaagacaatacgtgcaccactgaacatagacccttatcaggagtttatgatttttctcctgtcctgtttcctcaggagcatgtgatctttgttctcctttttgccctttgaagcatgtgatctttgtgacctactccctgttcttacaccccctccccttttgaaatccttaataaaaacctgctggttttgcggctcaggtgggcatcacggtcctaccaatatgtgatgtcacccctggaggcccagctgtaaaattcttctctttgtactctttctctttatttctcagccagccgacacttatggaaaatagaacgaacctacgtgaaatattgggggtgggttcccccgatatgtgatgtcacccctggtggcccagctgtaaaattcctctctttgtactgtctctctttatttctcagctggccaacacttatggaaaatagaaggaacctatgttgaaatactgagggtgggttctcccaataaagtggtaatgttgaaatccacagttctatggttaggggaaaagcacaaagcttgcaattgcagcagcaattgcattgtcattttaatcacactcatatttgtgtaaccaacttagaatataaccaaagtgagtatctgtgggacgttgtgaaagcccatttgcagggagctttcacatctaacatcacctttgatattggtgaattacaaaacaaaattcttgatttacataggcaaattcaagagtttctgccttctttagaagactggaccaaattccagcaaggcctggagagcctcaatccttggacttatctaaggcactacattaacatcttacatgtagttcttggaataatattgttttgtctctgtcttctgttcatagcctgtaaaattggatggaccaccaatcggaaaatgagagctgcccaccctggccttacattctttcaattaattcataaacagaaagggggatatttagggagcctaaggctcgtgggactgaccaactcatcattccactggaggctatatgataaaacagcaaactgtttatcatgaatgcaggatgtgggcaaactcacgactgctcccactgccagaaggtttgctgagggcaatcacttcctggcaccaggctccttgaggttatctactgggacatctggagaatgcagtcttgcaagcctactgtggactgagcagctgatcccttcttccacgccccccttctcactatctcttttgtctaatcactacggagggttgtgtaaagctcagggcccttgtccactagaggcaaagtgccccctgaccgcttcttccaaatatactcttttgtctcttgtcttttattcccacgtttgccccctttgttcagtttccctaggtccatgtgggttacatagtggcaacctgaacaatgacagaatcaggtgctctacagaaataactttttaaggaaagatttgggacttagagaccccaggagacatacacaaaaatgataagaggatgtgcccaaaccagtcttaaagttgtggcacagggtgaggaagatgaagctgttactgaacctcagagagtgactggtgttacagcaaaagttagcaatggcctgaagggagggtttctgaaatcaaatatgaatgattccccctcagggaacccaaccttgggaactactgcatggttctctgtatgggaaaatatcattaatgcaggataaattgtgaaatatcacaggaagcatcctgcatctagtcaatcttctgtttctggggtggcctgtgcagctgtgcaggcagaggcccaaccatcctggtgagtggcacacagggactgagatccagccacacctaccaggccatgctctgggaagggggtgggacctgggcaaaggacacctctctaggactgcacagaagcctttgtgggtgggtgggacattcctgtgatggccttctggctgggcactatgaaatgctctgaagatttttccttgcactgttgcactaaccccagtcctctatcactgccccttcctcctgggcgacttcactgatgttgtggccatgtgaattctctggccaatgaaatgataaagatgatatggcctctgccaagcagacactgtaagtattattgtatgatgcttttgtctctttttttaaagttaaagcagtttattaagaaaataaaggaataaaagaatagcactccataggcagagcagctgcctctgtctcttatattttcccctctgcctcaagcccaacatgcccaaaattggggctgctggttcagcctgggtctcagaataaagacatgagccacagatccattgctgacccatgatggagatggacacaagagagaaacacatttttgtcatgttagccactaagattttgatttggaggccatttgctacagcaatataacctagcgtgaacagagagacacagcgatgttccatttcttttcaacctggaacaggagaatttcataggtgggcctcaatttcactttagtatcttatttagacaagaaagttcatactgttcaaatgtcatgtttaagagtgctggcattatcactgctgtggctaccccatcagatgttgctcactgactaatcttctcatgttagtgaggatggacaacatatcaggccataattcaaagtagcaaataggaaaagagcttcatcctagcattatgggaccttaattaatgtcctttcctgacaggtttcagaggcttttgcaggcagcagcagagctattcatctcactgacagtggggaacatggccaaatggttgcccccacaatggaggcagagtttcaggacacttgtctgatctctgcccttgaaggaacagtctcaccctgattgacacttttgcctgttatgtccaaagaaccaatggaaaagcaggaaaattattccttcttcatttctctcttcattatttaaaattattctgtcttcacttctctctccttttctctgcttcctacttagctctttagaaatgcaattataatcttttatctccccttcaccagacactcccaacagggcaagttcatctaactatgtgctcttagttagacgctacagagcagaactctctcccaccaagagactaccttgagacataacagtcaattcacaagccaaaatatgcccgctatgaaactctcccatctggaaattttttggctgcttttacaacctagttttgcccacaaaggcaccagcagtaaccaactcaactgcctggtagacaaggcaccaaagccagtacccagaccctctacctgctcacttcctgccttgcatgccacgccccccatttaaaagcctctgctttctgctccaaaggtgaagcagttacccttaaggaaagaagcctgtacttcttcccctaaggtagctttggaataaaagtcactttataccaaacctagctcttgttaattagactctgcaagtgatgagcaactgaacctacatttcagttataattcctatgcttgttcttcctgccctgccttggggacacgcacacactcccaggcacatacatgcacgtgcactgagacagctatgtgaataaccaacaagatccccttaggaaaaccggtgcttggcctggccttaaattccagacccttgggcatcatacccaagactgcaagaaagaggaggggctggacctgaaaaacttggaagggaaggtccaactgtacaggtattttgtcaggcatgtgatttcagtataaaattctagaaaagatgagtgacactttataaggagagaatatcaacaaaatttctcattttacttcttgctaagacgacagcagggaattgtaagcagatggatgggcaatccccaccttcagcaggggaggccaaggccccaacacacctggggagaagagctgggggcagtgaatggctgaggctttcttggggagctgggccatcttcttcggttttacttcctgaggaattcacaggcttccaggagggctgtgggacacaacagagcaagagattcagaaactgatttcttccattaaaccagttatttaatccaataaatcaaagagaatactaagagttttctctgcccttctcccatcactgagtcagtgcttgccacactcatattcccactcccctactcctagcgactacggtgttcaagggagccagagtctagccctcaccagccagggtgtttccctgctctggcctgagagacacaaccaccctgcacttgtctctgattgaatcgactgtcacattctcaagttcacaagacattggtggtcctctagcttctcccggaatgtgaacctgtttgcaatcatgttcacctgcagattcactcattcattcacagatccttactgagcacctgctttgtgtgagttgctgtgctaagtgctggggacacagcatggatagactggcctgccctcaagaagcatgtggtctatgcagtcctgagctggctgctcacaagaagagccctgtagccatatttctcagagggtggtcctgacctgcatcacagtgacctgagttgtttgtcaatacagaaaagggtttctcaaccttggcactattgacatttggggcctgataataaccctttattgcagggggctggctgtgctttgtttagtagcatccctggcctctacctatttgttaccagcagcaccctctatgttgtaagaatcaaaaaaatgcttctcacattgtcaaatatcccctcaggggaaaaattgtctctcattgaaaactaccgataaagacatttctggccctgcccccatccttggaccaacagcatccctaatgcccccaactctgggtgagggaccaggaataggaatctgaatgattgcagtgcacagggagctgtgcacactgaaatcccacagttatcaccgggagccttacaatactctgtgatgtcttctaaatatttttaagggattaaattaatatcaacatatttccctggttaagatgtgttttcctacacttgaatttttttgagattttgttttctctatagttggcatctatggtaactgtctagaatcagatttttttttttttttttttgaggaagggtctttcggtgtcacctaggctgtagtgcagtggtacaatcatagctcactgcagcttcaaccttctgggatcaagcaatcctcctatttcagcctctcaagtagctgggactagaggtgcttgacaccacaccaggctaatttttaaaattatttttgtagaacaaggtctctctgtgttggccacattggtctcaaactcccgggctcaagccatcctcccacctctgcttcccaaggtggtgggatgacaggtgtgagccatcacacctggctggttttgtcatttctcaatgcatatgtatatatgcacctttcattttactgaataaaatggattatcagtttccaaagatttcatgacagtgccgtcactatccgtactataaaatttataaaaatttattacatactgctctattttattctctaattattttatcaatgagattataatttcctgaactgtaaagagatattatctttccttaacatttttacacctgtgttcgttcctagaatgctgtttggccctcaaaccttgaccttcacccatggtggtttctcggggatgctagctagggtctacttacgggaggttgagcactttttcagattagtaatgcctgcgacatactgtggtcccaaatatttttcatatgttgttttgccatggagtctggccagacactcagtgttgtcattgaacagaaggtttttggtttcagactggaataagcaaaacttgtccgggcagtcagatccatttctcccaaatttagcctgcgacaaaagggcagacagtgagtagctaaggaaaagaggaatttgtgggttaaaggaggcaaaggggtatttcttccacccaagaacagccctgagaaaaccatggggcagaaggagctgagttctggagtcattccacctccttagtggagtcccccaccccacactcctggtggcaggcccgccttgggcagcatccaggcctcacaccacttctggtcctacctcctaccatctgccatctttccttccttcttaacctgtgaccttttcccatacaacttcttatgggtgacaaggcaacaatggaggggttttgagatctgccctcacaagtcaattgctcaggacattctaatatgcagctcttctagagaggcaggctgctaggaaaacccaggctcagccactaaccagctcagtgtgcaggtcggtcaccctgcctccctcacacagttcctgctctgtcccaggctcccatgtggggagactgagacccaaacccctcagtcacggcagctctctcaccagcaccactgtgtgtgcacattaagagctccataaaggccagttatggtggccagtcttgttattcctgagttgttttcttcaaaagcacacagagacatgatgttatatgataaaaatagaagttctaataaaatcccagattttaagaaaattttgggatttcgttcaaatcacatttagagagccctaaatctatagggcaccttctgagtttgctgttttagaggcctggtctagagcactgttcactcggcccaggttcaggaaatgtcacctgagtaaaaagcactatactaatgcatgtgggaggaaggctcagtggcttcctcatttgccagaagaacagcaggagggaaaaagacagcctctgagccaggcagtgatggcaacaaggccagggcacagagtctcagcagaaatggagtgagtcccagaaagcccagagtcaaaagcctctgttgttcttgttgacactctgggcaacgccacagcatgaagccaatactctcaccatgagcttcaagtagaggactagagaggatcgagtgggctggtgcacctagctctgtgatctcctcacctaacatgagcccacacagctaagaaagcactagaagccctgtggtccatacctgttggtggagcaacacctgtttcaggcgttccaccttatccatccgagacaccacggcatgattcggggccatggcaagatggcagcttctagcctcagtcacaggcttccgtttgccatcgaggcacagcagcgcaaagtctgccagcttcaaatccttagcccatgcgtcattgttatttcctggggagaaaaagaaggtggcatcatccacgcctcccctgcttagccaagaagtctcttctgggtgggtgtggccattccactgacctcccaaatgcacacactggggttgtggtgatgtgaggaacagagaaggagcttcatcctacacaagctgtacaaacttcaaatataccaaatattagtgctgtgtccatgcaatggaatgttattcagcaataaaagggagtgaagttctggtacatcctgcaatatgcatgaacctcgaaaacgatgctaagtgaaagaagccagtcacaaaagaccacacaataggctgggcacggtggctcatgcctgtaatcccagccctttggaggccaaggtgggagaatcacttgaagctaggagttcatgaccagcttgggcaacatagcaagacctcatctcaaaaaaaaaaacccaccacatattatatgactccatttatatgaaatgtccagaataggccagcctatggagacagaaagtggattgatggttgccaatgctgaagaaggatagggcaatgactgataataggtgcaagggtttctttatgggaggatacaagcgttctagagttggattgtgttgatggctgcacaactctgtgaatgtgctggagatcactgaattgtacactttgcatgggtggattttttagtatatgaattctacctcaataaagctgtttagagttcttatttttttaaagaagaaaaccctccacctatgccatatttttcagtgagttccagaaaaagaatagatggtttacattcaaggagaaattggtttctcctccctttcatattcaaatgctattagtgtaaccagagaaaggaaaggaacttttataggtttatcaaatatatacagccaattctaacaaaatacagttgtaaagtaccggagaaagttaaaattaaatttgacatcaatctgatccctggagattacttcagttaatggcttgtaaattctaaatgtaattgtatgcatgtctatgtttgtgcagatgccggctcattgttccggctcccgtttgtctctctgctctctccctttaagaaagcactttattcattctcttggattcctctatttgatattgaaataatttcaaatttacatgtcttgttttaatctctgtcccaagagacactagaaggagcagaagcagaagggagaagtggctgagactgcagtgattactgaaggagggaggccgaaagtggagacagttctttctcaggaaacagaatagcaagtcacctgctgagacttgggggttggaatgctgaagtggggctaaggagacagatgcagattggaaggtagcaaatggctgaggaccaggagagagagtgattgttcaaacattggctggaagattatcttccatcatctgcaaccacctgtaattttgttcccactaactcccaaggagtctccagaccaaggctcacatggggatgaatgaaggcctctacttcctttttcataaagggaggcttcatttgcatatgttcacccagtttgtagcatcatccacagtttccaataggcatgcatgatctcatgtgggcagacagtgtgtttctgtggttgactagaggaagccagggagacatttgctactgagcatggctagtatctgtgtgtgtgagagtgagtgtgtgtgtgtgtgtgtgagagaaagagagagagtgtgtgtgtatgaatttcgtttcaaaatccatatgacacctacagatgttatcatgttgtctattgagataaagaattttggagttcttttaatcacaaatatggaaaatgttataaaaccttcccaaaggcaaatctgaacactaagatgtgttgtgatgccaaagactctgctttgaaggagaaaaggaaacaccttcacctaccatcagtgttctgcaagacagtgacatctttcacaaatgcaacgtctccagcattctcagccaggcacctaaaatgttccagaaaatatacacataattacagaagagaaactagtggggctttcataaatatttgtaatatgcattccaaaaactgaaatatggaagtaaacatctaaaagacaactatttctaggaatttactgtttacagcggcagattgaacacaggtgtacctgccctccttttaaaaccctatataaaagacattacaaaaccaagaaatctaaagatatgcgacccaggaaacaggcaatctaacatgaagtaagacaaaggaaagcaccaaaataatggtcaacaggacccccaggaccacagatgtgcaggcggcctacacagcaaccagtccaaactgcagcaggaagatggatgccttctggagcagcacttccaagtaaatgatgaaactgtgatagcacccagagagagagagagagagagagagagagagagtgtgtgtgtgtgtgtgtgtgtgtgtgtgtgtgtgtgtgtgtgtgtgtgtatgcatgttgttaggagatttacattactggcagacagtttggggatgagatagtgatgtgtttttttaagtgcagaaaattaagcaaataagaaaagacatttatgaactccagagtaaacaaaaagtttgtacaataagggaaatataatatgagaataacgcttacacagtcataagtactgaatatgacattagcgtgttgggtgctgaagagagttgaagtctgtggttgtgtggtggaaaaggtgctgggggcagtgtgagaggctagatcttcttctatactacagagtcagcagaaagttaaaaattaagaaccagcattataaggatgatagaaataaaggggtatgacactggtttcagcttttaatgattttgctataaatttccccaatctagattctagatataatttaaacaaaagacaagggattttcttccagtataattaggaatattaaaatgtgggtgtttccagtgaactaataccttgctgcaggtctgaaaaaaaaaaaaagaggagcacatgcttctttcgggctcttatgagacatgtgttcagcatttctgagtagaatcacatttccatttgcaaatccttagtcccttaaagatatttttatacattcacaaaacatttttttttgttttgggtctttttttatgagccacttatatagcaaaagctacttttctgtcattccattactggaacaaggctgttgaatttatattaaaaagttcagacaccctcagacacatgacgccatctggtcgtgaaatgtactcttggcaaatggaggaaaaggaacaggggaagatcctctctgcacccttcacactggtaaatagtgcccctgagaagcaacacccggatgaatggtgctgtaaaacgtggggtgtggttacaagtcactaagtggttataacttatgaattctgaaaacttgttttttggcttatttttcacttcgttactggagaataacactgcaattctgccatctctttgccatttctaaggccaaagtcagagaaaaagggaaacctaagccatagtcatgacctaggtgagaagaaaaggggcggcgatgggaaagagaattcttccccataaatggaattgtaggaagcacttaggataccacactctacccatttgattttcaggacgaggctattgaggcctactgctgttgatcttggctcaaagccacagggagaagcactgcggagctgaggtcagacagccctggtgccagcctccactctctggggcggtgggtgtggtggggacagccctcactggggccacccatgagctgacccacaggatgacccccactctgctgtgacaggtcacatctggctccttagaactgcaatgctgacatgctgagggatgaggtaagtccccatcctgatggagctcagtcacagactcaccggaaagccccagtgtagccgtagtatctctcgttgctgttgggcacgcacttattctcaccctgctcgtcgccaatacacagagcacagagattagatctcgggtcagacccaggggcacagctttgactgaaatattcatctggagagaaggaacacggggagtcagctcttcaaacctgagtccacacaagcaacctttacctaacagccgatgcagggtggtttcagttcattagacttcccaggacagcaatctagatagaacacactcaccatcacaaagcaacatgttgtcaccaacataggacccaccagaaaagcttcattcagactgtaggcacagatggacacccaactaaggctggggatgagagctgtggctgcctggagggtcccgtcatcacagccttgagctggggactcagctcatgaccgtgatggctgtgtgcagcagagcctgtgagttgcctagtccaggatctgattttgtttttatcagtaatggaaaccctgctttgtatctgggtgcttggccctttggtataaagactagacttatcagactccctggggctcatatggccatatgggtagctataggccagtgaaatatcagcaggagtgttgggcgccagcttctcagaaacatccttgaaagacaattggtacatgccttttgccctttcttctccttctctttcttcatcctgcacatagaatgcagaagcagggactggacttagagatgcaatgtgggccatgaggtgaccttgagcatgaaagccacacaaatggcagagtagccaaatgattaaagcccaggttccagaccccatattgtcttcataccagccctaggcaaaccacctctggactacatgacacagaaattaacttctgtcttgtttaagcctctactatttcaggagttttctgttccttgcagctgaacctgatctgaattcgttcattgtgtgatttaacccaagaaagaataaacaaaggtgacaagaaagctctgccccactgagcaaacgtcacccattatcagactcccactgctgctggaagagccacactatgtgtcaacctcaggaaaagctgggagttcccattccatcctggcagtttccctacagctcagaggctgccatggagctggtgaggagcagagccacgtgaaagctgcctgccccggccaggatcaaaaacccatgcagtggagcccctgccctaggagacgcccatacaagaagggagtcacattgaggatgtgctacacaccatgccacggggcccacagcaggcagggtgtggctgatgctgactaggatgagtgtggggtgtggtggggagagaaaactgcagaagcaggtggagccaggctcttgaggtcttattcaggctccgttgcagtgtagagtaagcgtcagttttgcttagtaacaggagtcacctttcatgaggcaggcagacatctttccccaagctgggaagccagagtttaagaggaatttaggtctggagctccaagaggtaaaaagcatttgcacatcttggaacttgcatttattcttagggtgcagcgaaataggcagatattccaatctttaatcttggggtggggtgaatggggcatgggaagtgctgtgcagggaaacccccagtgcacccacgcctccagggggcagccacagggagaatttccttatgctggaagaggcctgcaggccactatcagcctgcaaatcccctcccctcccttccctaaggttccacagcacaatatgcctaccctccagggtggcccacccaccgcacctttggaactccttaccaaatttgcaggagcccgtctggttgaagagcaggcccatggggatattccagcctgcagtcctgtccacggcggtgtggcaggacttcttgcctttcacagagttccaggtaaggctagtgtctgatctcctaaccaccgccacagcaagatatcctggcataacagatgacagaaaaacaagtcttaacctccaggaggcctggcacatggattccagtggagctgtctacagcccaggccaaaacaggccaagaagcaacaccaggcaatgattccctcaaagaactggcctttttaggtagaccgagaaagcataagctgctgccttatgttaaggtgagattgatgaaataaaacagtaagaaaagctgattattttagtgattacaggggactgtcttcaaccagccacacaatgtccctgagttacaaaccagcaatgcatctctcagtgtaagcttctacagcaacaaacactataaacaacaagagagaccccaacagtgcataaatcaccaaccacagtgtgcatcaggcaagagcaccaacatccagccagctaacggctgtgtgggtacaggggcacatgtccccagggactgccctgagctgagtctgaacccaccctgcactggttgaactcaacatggttgccgttgtcctcctgagagaatgcatctgacagacacccaccaagggcaagtcttttctgaaactgagcaagcaccagctctggtgggcaggaggagtggtgcacagagcactgggacacgagtcccaggtcacgaggacccggggtcaagaccaggatctaccacagtattacctatggctgtgagtgagatcctgggcacttggggactctcggtgccactgtttcctcatccccatgaggtggggaagtagcaccccccattccatgaccatgacaaaatgagggactatatggatgttctttgccaagtgtgaaggtcaatataaacattaattagaactattcctctgtgaattatttgcacccttaaaattattgctcctagaagccctatagcttctagggctgcaattctttctgttttttttacagttcctgccacttcctcttccagcaacaagaacttatccttgaccctgaaagtggctaatgccaactcaccttccacaggtctatccacacagttaggatcagggtcactgctttgttgggattctgaaagaataaagacaagccagacatcattatccattcagatgtagtgagaagccacaaactcttaaatctcaatgatgcagaatcaaatccaaagagaccgtcccagcagttccatgcaggagaaatgcgtctatatgttcaacaaaagacatggcacagagattcacagctgcattattcaccacagccaccaactggaaactactcaaatgcccatccacactcaaatgatgaataatcacagtagactcacacagcgacgagactgaacagtctacaactacacacttaggtggatgaaaagcataacgatgagcaagagaaaccagacataaaaaaacacatgctgtgtaattcctttaacatgaagtttaaaacataggcaaacttagatctgcgaccttagaagccaggagagaggcttcccttgcaggagtaagggggcgggggacaggaggacataaggggcttctgaaacttgcagtgtttgttctgggcccgagagcatggactgtacagtgtgtgaagtgccatgagttgtacatttatgtgcacttttctgtttgtatgttataattcactgagatcttctggaaaattaagaagataaaaccaacctgtcccttgttaattctcaacacaataggctttgtgggtaacacggcccctttcatttcttctttccctgattctcccttttgaatgtatctgttcatcataatgtttcacctgcattcaccgaatgggattactcatagccccactcccatgacccagagggaatataccagaggatgctaactccacttactgtagttctctgccaggacaggcaccaaaccacatttgcctgcagtgtacacatatcctccatccaaactcatggcatcagcttctcctttctgcaaagacagagcagatctccagcaccacagtgaggctgcatcccgtcctgcctgtctatatagctctctgagagaatggttttctgtcaggtgaccagtgaaacagcagaaagagatggactattcaaactgagcagccagaggaaacaccgtgtgcaccactaattctctcccagccctgcctactttctgggctgtcaattcaactggaaagaccaggcacaggttgcactaatcctctgtcctctgagcaaaaccttttctgtgtccctggcactttggggacaccttcctggagcagtctcactgactgaggacacagatgggaacagctggcctcatctaatctgaactcattagcactccactccaagcgctacacagaagttgtccaacacataagctgaagtcgtcatattggcccaccaccagaatgaacaagtccaggctacaacacaggatcatggactcatcagtagtatgaaacttcctctttgacccagtaatatttttacaactatattaaaaatagagaagtggacaaagatttctactcaagaatgctcaccacagggttattgataatagcaaagtaagggacaaagaggaatgggggcatgactaaactgagccatattcacataaaagatatcctggaagcatgtttaaaaaatgttttcgtccgagtgctgtggctcacacccgtaatcccagcactttgggaggccgaagcaggaagattgcttgagcccaggagttcgagacgagcctgggcaacaaagcgagaccctgtcgctacaataataataataataattatgcaggtgtggtggcgtatgcctgtagccccagctacttgggaagctgagatgggaggatcacttgagcccaagagttccaggctgcagtgagatgtggtcgcaccactgcactccagcctgggtgacagatcaagaatctgtctcttaaaaaaaaaaaaattaatgctttccaagagtaaatattcatgtggaagaatgcccattatacgctgtttagtgaaaagggcttaaaaacgacatactgcaacacttcattattgttgcatgcatatctgcagatgtgcagagaaatactggaatggagaattagccagactttaaccatgtctgtccctctgtgtgagatcacaggtggtttggggggtttgttgttgttttgttttaacataatacctttccatattttccaaattccttataataatcctgagttgttcttataaccagaggagtgggaaacccacagtaaactgctttttgaaactaaaatgctttctggccctgagcacacctctccaggcatccctgcctcacccaggcccccgtggcctctttgactgttgacttcactttaagcagatgcccaggccctaggtcttccaccgggcccaccgcccgcccctgtgatggagctccctaccagcaccagggcgatgcagtcctctgtggtggaggccgaggagcaggtcacgctgccttcgctcaagccactccactggttacacttgcgcagctcctgctcgcccaccgcacaccacacgacccgcgcacgccgggcagccacttcctcctcacctgccagagggaagaccgcaggtggctgggcaacctgagctttgccaggttgtccaacctccccagagccagggtcctgcccagactctccctggaacaggagctacagtacatgtgtggacatgtggacccataccctctcctcctccacttctcagctccaagccccttcttcaggtccacagagctccctgtgtttcccacttctgttcctttggagaagttccctggcttctaatctatccattaatctttagagtcaggaggcgcctattgtctctgtctctgaggataaacgctccatgacccagagaccagtgacagtcccaagagatggcctaggggaccttgagcccaaccctgacttcccctaacgcctgcaatcaccaccaataactacggtgcagcctctgggttcccccagactcccacccccagccccccagtagagaaggagccatagctgagttcccccaccatggtgtccccaactaagttcaaggtctgggcctgggaagtgtgggtaaatccaggcccccggattcatccaggaggggtcctggctatctttgttcatgttcatgtttctcacttaataggaggcaaactgatttttctgccaggcctggggagcctgacgtgcactgatcaggtggccagactattcttttagagacacctgacctaatccacagaagacactcacacctgcatcaaacctccacgatgaccccacagtgtctgggaaaaggagtgaccgccacaaagtagggccacctgctgggaagtagaagaccacaccaggcggacctcaggaccctcctgggctcactcacttttcctcaagttctggatggcagtgaagtagccggagccaaggtacagcccagaatctatcctcgggggcaccctcgaaaacccaatggcagagtccttgaacagcagatctttctgcccactaggggagccaaagagctggaatttcggtgacttgtcctttccaaacttttcctaattaagaaaaaatagaattatggtgtcaatggtaaatagggaggaaacaaaaaaatgatgttaaaaaagagtatctggagctttgggatcattctaactgagagcaggagcctcggttgagaccctcctgcagagggacttgtgccatctcggagacccaagctcagctatggctcattctttgaagagttgctgaggtccaagcaccttagggccctgagaagattgcatcgaccaccccctgcttctgctcccatcataagacgctgtcagcccgtgtgacagaagagtttcattgcttctgctgtccacagtacagcctgggcaagcagcccaatgcattagtgtgctatcctgcagcaaagctacaggacttctggagtggcagaagtcagggaagtaagaaaccttgctccctgccccccatatccaagcaagtggggaggaccgtgggtgaagatacctgtgcctggcggagaagattccagatggcatcctccttgccattcacacttcgtgccacaacggcatgagaagggacccgggccagatggcagtctttgaacttgtccactggcttccgagtgttgtctgggcagagtaactcatactcgtccctttcagcctcgtctgacaggtcctctgcagggaaggtgaggtgggagggagtctagataagccgactccagcagtaacctcgagctatagttccccttctccctatagaattttgagcttggggagatagctgacaaaactgagggtcagaaaggcaggggtttgctccagaacactcagaaaggtaaaggtagtgccccaaaagcctcagggggcagccgaggtgtgatcctcatcctaaatcacttaggccaccctggggttcccgtgcagctgctgcctggcaggccagagaggccaaaccagacccgtctgtttctgcggcatctctgcctggaaaagtcactttgcagagacaagctcagggggccaccaagggttgctcccttactcacatctctgggaagaataaaaatgacaaaaatgttaacaaggcagggaataaggcaggaaggtgagacactttccaacactgagtatatcaaaagaaggggaagaatggttttatgaatgagttcaggcaaatgtggaatatcatatataagttgcttcagaatgtgtaaagtgaaaaaaatcttgcccgagtcattttatgagattagtacaaccttgatgtcaaaatcagaaaaagtataggagggaagaattaaaagtttattttacttacgaacataaatgcaaaatttgtaaataacgtactaactaactcaatctcacagagtatttaaaaagctaatagattggaatgaaggtttaccagtgtattccattaacaaaagaatggctgaacatcaaaaaaactaaagtaatctgcatttaatggcagaaaaccatgagatcgtcttcatcttaatagatgcagaacgattgtttatgtgttcaacatctatttgtgtgtggtttttttttcagcctcagaaaaatagtaatagatagaatcggtaaagtttttttgtttgttttgagacggagtctcactctgttgcccagcctggaatgcagtggtgcgatctcagctcactgcatcctccatctcctggagtcaagagattctcttgcctcagcctcccaagtagctgggaccacaagcgcacgccaccaggcccagctaatttttgtatttttaatagagatggggtttcaccatgttggccaggctggtctcgaactcctgacctcatgtgatccacccgcctcagtctcccaaagtgctgggattacaggggtgagacaccacgcctggccataagttattggcttgataaatgccattaatctacagcaaaaaccttactaaaagaagaaaatgtagacattcaccgcaaaatcaggaacaaggcaaggatgcccactgttacaatgccagcacaattctagatatccagatcacacaatttacaaaagaaatgtgagatataaacactggaaggaaaaagacacactcttatttaaaaagatgatatcgtcatctacaaaaaaccaatgaaaccaacagaaactaataaaactactcagaggagtaacaagttataagagcaacctacaaaaatcagatgttatcctcattaacaataaccaaatagaaaccaatatggactataagatgttacaatagcaactaaaaccattaagtagctaataattagcctcccacaaagacacatcagacccacaaaggaaaaattttagttctatcaaagaaactaaaaagaggtgtgatcaaatgggggagatttagcatcaccatggactggacaacttaatgttataaatatgctgatttttcatggaacaatttaaattcagtacaattcgaatcaaaattaaagtatgattttttccagaaattcaacaaaataattctgaagttttagctgagtatatttgaaaaggaataataaagtgagaggggagagggagctctctctcattctctctctcttcctctcactggctctctctctttctctccaccagatagtaagacccattggtaagccacagtaacaaaagcagaaaaaatgcaaatacaccaatgaaataaaatagctcagaaactggtccacttggatatatacaaacttggtgtagaattggcttcacatatggcagaaaaaatatactttttttattgtaaggtaaattgcctcactgtaaaggggataaaatgctaaagccaaatctatatctgactttctaggtagagcacatataaatagatgaggaaggggatcttcaaatcttattttaggaaataattatgatttgggtgtgaagaagggcatctttgaaatatctcaaaactacaaaccaacaaggtgaggcttgtggatttgaccttatcaatatcaaggatttttgatcaacagagactaccgttgtcagatttttgactgagaagaggttttactaaagtttaaaatcagcaatagtttgatacctagatagaaggaacttctgtccttgaatcaaaatcatgcagaaacaaggtgtgaaactcaatttaaaaagtagtcaaatgtcacaaaataagaaagggaagcccaaacggctagcaaatatgttgaaatgatcaaactcaccagctgtcagagaaatgaaaattaaaaataaaacgaactatctattgcattacaaccatcattcggacaaaaagtatgaaagtcaaaaatacttctaactgaagttgtggggaaattagaacacttgcagagtgtcattccagacagcagcttggtgatcctgggtgcatgtggggtctgtctctggtggccctgggtgcatgtggaggtctgtttctggtggcctctgatgaatgcggggtctgtctctgatggtcctaggtgaatgtgggtgttgtctctttctctggtggtcctgggtggatgtggggtgtgtctctgatggtcctgagtgaatgtgggtgtctgtcactttctctagtggccctgggtggaatatagtagccctgtctctattggtcttgcatgaaatgtagtgagcttatgtccactagtcctgggtgcagtgtgtttagcctctacatactcatcaactgctttattataagtccaggagggacgctgtccagcaggtaagtaaggaacacaggtgaaggtatcagtcgtgtggctgcatgtggtagaggaaaagagagcacaacctctgtccatcactatggtgacagagaagtaaaaggtggatgtattccacggaacactcctcaactgttaggacccctgagctagacatgtatacaacaataccgataaacctctaaaacaaaatgctgagcagaaaacccaagtagcaggatttctaatgctcactaaaacctctatgaacccagaaaccggaaacacaaaccagcacaatctgttctgcatgagcacatgtgtcttggaggactggaggacgcattgccaagcacctaggcatgggtgtctatgaggggaagagaaaggcagtaggcacaggaggtttgaagaaaactgatcatttaaaatatgaaagatcataaaatcagagctgtgccctgtaggaatcttgaaaatggtctgccatgaacttaggaatctaattagctcaaaggtcagagtcatgatcaagtaagataaaaggggtcagtacccacggctcattaccctgctcttaccaaacactgtgctctctctgataaaagccacgtctccagccccgtctctcagacacctgtgaaaagagaaaccatcaggggtaagcacaggcagccctccccagcccctccctgtggaacagtagccctggcactcagcatctatgggtttctactccctgcagggcagggctctgaagctt

SEQ ID NO: 1169 - DNA, 2121 bp, Homo sapiens
  Genbank Accession No. V00568
ctgctcgcggccgccaccgccgggccccggccgtccctggctcccctcctgcctcgagaagggcagggcttctcagaggcttggcgggaaaaaagaacggagggagggatcgcgctgagtataaaagccggttttcggggctttatctaactcgctgtagtaattccagcgagaggcagagggagcgagcgggcggccggctagggtggaagagccgggcgagcagagctgcgctgcgggcgtcctgggaagggagatccggagcgaatagggggcttcgcctctggcccagccctcccgcttgatcccccaggccagcggtccgcaacccttgccgcatccacgaaactttgcccatagcagcgggcgggcactttgcactggaacttacaacacccgagcaaggacgcgactctcccgacgcggggaggctattctgcccatttggggacacttccccgccgctgccaggacccgcttctctgaaaggctctccttgcagctgcttagacgctggatttttttcgggtagtggaaaaccagcagcctcccgcgacgatgcccctcaacgttagcttcaccaacaggaactatgacctcgactacgactcggtgcagccgtatttctactgcgacgaggaggagaacttctaccagcagcagcagcagagcgagctgcagcccccggcgcccagcgaggatatctggaagaaattcgagctgctgcccaccccgcccctgtcccctagccgccgctccgggctctgctcgccctcctacgttgcggtcacacccttctcccttcggggagacaacgacggcggtggcgggagcttctccacggccgaccagctggagatggtgaccgagctgctgggaggagacatggtgaaccagagtttcatctgcgacccggacgacgagaccttcatcaaaaacatcatcatccaggactgtatgtggagcggcttctcggccgccgccaagctcgtctcagagaagctggcctcctaccaggctgcgcgcaaagacagcggcagcccgaaccccgcccgcggccacagcgtctgctccacctccagcttgtacctgcaggatctgagcgccgccgcctcagagtgcatcgacccctcggtggtcttcccctaccctctcaacgacagcagctcgcccaagtcctgcgcctcgcaagactccagcgccttctctccgtcctcggattctctgctctcctcgacggagtcctccccgcagggcagccccgagcccctggtgctccatgaggagacaccgcccaccaccagcagcgactctgaggaggaacaagaagatgaggaagaaatcgatgttgtttctgtggaaaagaggcaggctcctggcaaaaggtcagagtctggatcaccttctgctggaggccacagcaaacctcctcacagcccactggtcctcaagaggtgccacgtctccacacatcagcacaactacgcagcgcctccctccactcggaaggactatcctgctgccaagagggtcaagttggacagtgtcagagtcctgagacagatcagcaacaaccgaaaatgcaccagccccaggtcctcggacaccgaggagaatgtcaagaggcgaacacacaacgtcttggagcgccagaggaggaacgagctaaaacggagcttttttgccctgcgtgaccagatcccggagttggaaaacaatgaaaaggcccccaaggtagttatccttaaaaaagccacagcatacatcctgtccgtccaagcagaggagcaaaagctcatttctgaagaggacttgttgcggaaacgacgagaacagttgaaacacaaacttgaacagctacggaactcttgtgcgtaaggaaaagtaaggaaaacgattccttctaacagaaatgtcctgagcaatcacctatgaacttgtttcaaatgcatgatcaaatgcaacctcacaaccttggctgagtcttgagactgaaagatttagccataatgtaaactgcctcaaattggactttgggcataaaagaacttttttatgcttaccatcttttttttttctttaacagatttgtatttaagaattgtttttaaaaaattttaa

SEQ ID NO: 1170 - DNA, 618 bp, Homo sapiens
  Genbank Accession No. W02608
  misc_feature (1)..(618): n = a or c or g or t
tgtatttttggtagagatggggtttcactgtgttggccaggatggtctctatctcctgacctcatgatccactcgcctcagcctcccaaaatgctgggattataggcgtgcgncnacagcccggcccaacaacttaatcttttattagctttgcttaagagggccaattaaagcaaancctttagttccctttaacagggactggagttatgatgcatgtgttacgacttttggcccactgtccatgcaactctaagtgcaggttgatttgctttccagaaatcccaaagggcctgctcttggatcaccgaagagccttacctatatcaaatcaaaaagacattctgggtcagattagactatgctcctggccctacagattgcacataaactatcataaatacagctttttcagggaactagttctaaaactcttacctactgagaataagtcttaacactaagatgactgtattatatcaatttattattagaatcagacttatacctagcacaattaactattgtgtgggcaaagaacatttaaagggcatagtagaggtaaggagagacacatactcagctagagataaaatactaagttgcactgatacttna

SEQ ID NO: 1171 - DNA, 461 bp, Homo sapiens
  Genbank Accession No. W02823
  misc_feature (1)..(461): n = a or c or g or t
ngcntaccaatctgaagtgggagcggctttttttttttttttttttttttaagtaaatagtaaagcctttatttttgtgttaagaacagcattttgaaaataaaacctatctgcccatgctttacagccttttaaatttgtaatatttatatagtcgtttatggtacatattgattgtcttgaaatttctttaacttcttttttataagtatgcaacagtcagccgggggaagataaaggtacattataaaacacacattaatgcatttaataaatatatattatctatcaaaagtgagccttagctcttcatcagttaataaaaagcacctgctnagaactcctgtaagctgggtatcatcattgnatcattgggattataaaagccacaatgctccctttcaacttggggtttgggcngagggggttcaactcagcccttgggcaaccgngaccaccac

SEQ ID NO: 1172 - DNA, 473 bp, Homo sapiens
  Genbank Accession No. W05248
  misc_feature (1)..(464): n = a or c or g or t
attcggcacgngggagggctcttgggttagttcctgttaggccccggcggcggangtaggttgaagtctcctaagatgcccggtgctgcgggcaccgggagctgtgaagggaacgtgagggggcggcgtagtggagacccacggcaggcctgaagaagagcggcggccgagccgcattccctgcaccatgctcatagaggatgtggatgccctcaagtcctggctggccaagttactggagccgatatgtgatgctgatccttcagccttagccaactatgttgtagcactggtcaagaaggacaaacctgagaaagaattaaaagccttttgtgctgatcaacttgatgtctttttacaaaaagaaacttcaggttttgtggacaaactatttgaaagtctctatactaagaactaccttccacttttggaaccagtaaaagcctgagccaaaaccactagttccaagaaaa

SEQ ID NO: 1173 - DNA, 592 bp, Homo sapiens
  Genbank Accession No. W07043
  misc_feature (1)..(592): n = a or c or g or t
gaaaacaacacattcgccaaggttatatggagcccctgatttccatcaaaaaggtttctataagtatattatttacatttttatacatgataactcttgcctttgtgttgaaaaaaaaaaagtctcttttttttcccccactcagcagttattggaaatagactgttcccatctgaaacccgtatcgtaatttgcatcaggaaacccaactgctgacattgaggacctgggtgtgttcaattatgattttgctggaggctgtccctcattttaatgctgcagctattgaaccaccttcctgaaacctagctgatacggaatagcagagacatgcctctcaacaccattagctttgcaaatgggcttcatttcagtcaacgtcgacttctgctttggccaattgaaaaatgaaaattaaaggagagaagaanaaaaacacagatgcacttaaaacatgaaaagaattatttatatgataaaaatatatttagcttttcaaagcacnagactgaatagaagtgcnccttttatgccttctggngatgttaccggttaatggncttccacatcaggcttaataaatccgtaatgn

SEQ ID NO: 1174 - DNA, 578 bp, Homo sapiens
  Genbank Accession No. W07304
  misc_feature (1)..(578): n = a or c or g or t
gaaaagattgatgtcttagaaggacagggttaaaaccttctgtaatatatttaaatatatatttttaagagagatgctacattgccaatgattttataaataatttaaaattaatttacaaatttatagatgcaaaccaaaagatctttttaaaagagagagagaggaaaaaaatcaccttttatttgtttgggtctcattgtcagaattattattcagatcaagaaatctgtgtcgataaaacctaatctcatattggagagtgaatgtcgttaagtatttctgaaatgtttctaaaaaatgaacatgaaaaaaataaggtattttctccctaagcttctcattacagtatttccaaattgcttcacactttaccagtttttaatacnaagtacaagctcctacnttttatnacgtgtactaccaagttttccttaaaaagtattggttggantttcagccggnactcctggtatcngcagncctttggnaattccggcaggctacaccccttaatttgcngaggccattttggtggttggttgatgccgaanccgttggttaaaagncccaactcc

SEQ ID NO: 1175 - DNA, 460 bp, Homo sapiens
  Genbank Accession No. W19285
  misc_feature (1)..(460): n = a or c or g or t
cacagacaagaaatactttaattaaatattgtgtaaaatgaacatttttatacagttaaatatctgaaaaaatgtacagataaaacaatcttattgtagggtctttaacagtaaaatctaccatttagtgaagtgctcagtcttgagacagtgaagtgatgtgggcattgactacttaacctaaaacacaaaccaagtgagggcatggggaagctggcaggcgttctcagtgcgtccatgtgagctcttttgttagatcaaacccttactcgtacaaaataaaatggaggcaatttagttccaaagtgacttctcaggctttcccatgtagctagaccttgtcaaccatcacaaagccagacttgtgacctgctgactcctggggacattcnggtttanttaaatttggtccccaagaatggaacactttggtaagtttgtgcattgttgaattttggtc

SEQ ID NO: 1176 - DNA, 637 bp, Homo sapiens
  Genbank Accession No. W22091
  misc_feature (1)..(637): n = a or c or g or t
tcccngaagccatgaagggatgaatcccagactccggagtaagncaccccctcacacacacacccctcccctgactctcaaaatccacagcctgncacagnagatttgctaaaaagcaaaggcaataataaccctggggtccgnccaactcatgccctgtacccaggccctaggagggcgagggcttagtaggtatcttcagggtcagagcctgagtcctcgcctngttggttctgaatctgactttgcttccggnacaaacaggccacctgagcactggtggtggcctgctccggntgcttgtcttcacggactcgaataanccgagggaagcgaagggagatgcccttgtcactatccaccaggccccgcgtagnagggtagatgggagagagggagaggtcagngcacttcacctcccacacagngctggngtccagccagtggtcggaaaatcacagngccatcttatccgnaacgtaangggngtggggttgnncaggaaccaggcgccttggagggttcttggtnggantnnttcccccccaggnttcctncggncnaattgaaagccccagnccccaangctttgggatttttgggccctggaaggttccnccantttnnccccncgccc

SEQ ID NO: 1177 - DNA, 713 bp, Homo sapiens
  Genbank Accession No. W22264
  misc_feature (1)..(713): n = a or c or g or t
nttnnctacgccctaaagnctccccccnacaaaaaatgtacatgagtttacaaacatattaacatataaataatgagaaccgtcctggtgggagcctcctccgttgtctctgctggagatgaacactgaggggcgctgtaaccacacagactgcctgtgacatcgggagtctcacggcagctgtcctgggcccgcagntggntttnngggnacctccaggttcaaccaccagtctgtctctgntgtgcccagggtagagcccgggggctgtgagtntgtgtggctcccctgcccgtcatcgntctggctcaagctcatgctggaagggacgcttcctctcccgacagtgcttcttgtgggagggcaagtcctnctnttggaattggaggccgaaggtcccggccaacttggangngcccccanntnntggcccccccgaggttgtttcttnaacancntggggagggggggggggggnggaancccatangggggggggaaaanggtccttcccccntttccaaattaaaaaccccgggggggaattntttntnncccggggtcaaaanttttngggnaaaggganntnttccttttctttttnggggnnntttnagggaagttttttttaatnttccttgggggtttnccccggaactaaccnnnnnnnnnnnnnnnnnnnncnnnnncncnncnnctnnnnnnnnnntccc

SEQ ID NO: 1178 - DNA, 594 bp, Homo sapiens
  Genbank Accession No. W26589
  misc_feature (1)..(594): n = a or c or g or t
nttactcctttngctcacaacttcccagcaagaaatgtcttacattgcaaccagttctcacatttagatgtatgggtgaaaagtttcacaaaacagtatttgcctttactacatgatgcattctggcctactttattctgcttcattgctgtgtaatgctggtgaccacctgctaattgatttcccattttactaaatgggctgggacccacggtctgaaaaccctgccttaggctgcaagcatttctgtgatctctgcgagctactccatataggtaaacacacgcgaggtaaactaggaaacagcttctgctttngcagattagaagtgaagttgacatcacgccaagtacgaaaaggntaaacagctgacaaaatttccacttgagcaacccctgggggagcgcaaaacaggagggaatcggggcaagggtgacttgangaaagcactggnagatcacgcactttanggnactctacactgccccatgntagggttatttgnnattgggnaggggatccaagttggctncngggntannnnnnnnnnnnnnnnnnnnnnnnnnnnnnnnnnnnnnnnnnnnnnnnnnnngg

SEQ ID NO: 1179 - DNA, 596 bp, Homo sapiens
  Genbank Accession No. W27376
  misc_feature (1)..(596): n = a or c or g or t
nnnnnggnnnnngnnnnntactaaatgtgactgatgagcgaggttagaagtggaagaaattcctgtgcatgttctataatctgacaccctgaaagcaagtttcctttcgtcattcacatgctcttgttctgccgtgactgttcaggtgtatggtagtaagtaaatgtattaacatggtgaacagtagtaatattctatcatagagtattagcccttgcaagttttcagggcgtcttttccgacttcagttttngngataaagaatgtgaacagttgttagatgttctcagtgattcaactttaaaacaactttctcgtgatgattcatttcaaaatcctgagtgagtctgacttgaaaaatacgagagaaaagagagtgggtttcccgnttgagaaattcagcttgggctacagtgcnnaanngggggggggnnnnnnnnnnnnnnnnnnnnncnnnnnnnnnnnnnnnnnnnnnnnnnnnnnnnnnnnnnnnnnnnnnnnnnnnnnnnnnnnnnnnnnnnnnnnnnnnnnnnnnnnnnnnnnnnnnnnnnnnnnnnnnnnnnnnnnnnnnnnnnnnnnnnnnnnnnnnnnnnnnc

SEQ ID NO: 1180 - DNA, 982 bp, Homo sapiens
  Genbank Accession No. W27541
  misc_feature (1)..(982): n = a or c or g or t
tgtgntttttnntattccgtgctctatcaggatggtgttaataggtctgcctcagaatgagaatcaatccttttagaaaacctttatactaagcctcctcttcgaaattcacagtggcgattagcggactggagtctggtggcgattagcggactggagtctggggacatccgtggcaaagacaccagctcaactttagtgcttcccaactttatttagaatgacatggggtgggtgtctggtgtgtgtgtttccccnacgcacctcccatagntattaacaactgaggaaggccaggagtagaattcagcttggtcttacccaggctgaacttgtcaaanggnnnnnnnnnnnnnnnnnnnnnncannnnnnnnnnnnnnnnnnnnnnnnnnnnnnnnnnnnnnnnnnnnnnnnnnnnnnnnnnnnnnnnnnnnnnnnnnnnnnnnnnnnnnnnnnnnnnnnnnnnnnnnnnnnnnnnnnnnnnnnnnnnnnnnnnnnnnnnnnnnnnnnnnnnnnnnnnnnnnnnnnnnnnnnnnnnnnnnnnnnnnnnnnnnnnnnnnnnnnnnnnnnnnnnnnnnnnnnnnnnnnnnnnnnnnnnnnnnnnnnnnnnnnnnnnnnnnnnnnnnnnnnnnnnnnnnnnnnnnnnnnnnnnnnnnnnnnnnnnnnnnnnnnnnnnnnnnnnnnnnnnnnnnnnnnnnnnnnnnnnnnnnnnnnnnnnnnnnnnnnnnnnnnnnnnnnnnnnnnnnnnnnnnnnnnnnnnnnnnnnnnnnnnnnnnnnnnnnnnnnnnnnnnnnnnnnnnnnnnnnnnnnnnnnnnnnnnnnnnnnnnnnnnnnnnnnnnnnnnnnnnnnnnnnnnnnnnnnnnnnnnnnnnnnnnnnnnnnnnnnnnnnnnnnnnnnnnnnnnnnnnnnnnnnnnnnnnnnnnnnnnnnnnnnnnnnnnnnnnnnnnnnnnnnnnnnnnnnnnnnnnnnnnnnnnnnncn

SEQ ID NO: 1181 - DNA, 882 bp, Homo sapiens
  Genbank Accession No. W28281
  misc_feature (1)..(882): n = a or c or g or t
tatcagacatcacagtaccaccccaggggtggcagtagacancaccccagaaatttagacagggatctcttacctttggaaaataggggttaggcatgaaggtggttgtgattaagaagatggttttgttattaaatagcattaaactggaattgacaagagtgttgagcatccctgtctaacctgctctttctctttggtgccccttatctcacccctnccttggaatttaataagtctcaggcattnccaattgtagactaaaaccactcttagcatctcctctagtatttcccatgtatcaggaaggaggtgtcttatgtagggaggaggcaagtatgaagtaaggtaattatatactactctcatncaggattcttgctcccatgctgctgncccnncaggctcacatgcacaggaattgctacatgatggcagtnnnntttccancttggncttaaccaagctgactcaannnngggnnnnnnncnncaancnnnnncncacancnnnnncncnnnnnnnnnnnnnnnnnnnnnnnncnnnncnnnnnnnnnnnnnncnnnnnnnnnnnnnnncnncnnnnnnncnnnncnnnnnnnnnnnnnnnnnnnnnnnnnnnnnncnnnnnnnnnnnnnnnnncnnncnncncnnnnnnnncncnnnnncnnnnccnnnnnnnnnnncnnncnnnnnnncnccncnnnnncccnnnncccnnnncnnccnncncnncnnncnncnnncnnnncnnncnnnncncnnnncnncnnnncncnnnncnnnncnnnnnnnccnnnnnnncnnnncncnnnnnnncnnnnnncncncncncccnnnncnnncnncnncnnnnnnnnncnnnnnncnccccccccncc

SEQ ID NO: 1182 - DNA, 463 bp, Homo sapiens
  Genbank Accession No. W31919
  misc_feature (1)..(463): n = a or c or g or t
ctctctttcttgattttattttaaacaacacacattaacattttaaaatagaatttaaacaggtgcccagtaacagaatgacagacgttaagtgtgaaatcagaaagttaaaaaactaaaccgcagatggtcacctttttattttttttaacatccgcctgcgctggactgttaagtggcctcatcactgtcaagccaggcaggatttgtaaagcttgggatgtgtgtattcagagatgacatttgcttggtgcctttaatgatttctgtaattagtcatttaaacagattgccctgtgatccaaaacagggaatacagagagatgagctgagaaaatcatttncctggaggcactttagagctaattggtggaaaatgaggcttgtctctttgcaagactctctggatcatatttcattgggtggggatggagctggagagcaacattctccaggaatctat

SEQ ID NO: 1183 - DNA, 479 bp, Homo sapiens
  Genbank Accession No. W32480
  misc_feature (1)..(479): n = a or c or g or t
ctaccggcaacttgcttaacctagaggtggggggtgacgtccctgtcggccccgtcacctggggcccagcacctctccttggctttgcagacgatgttccacaggagcccgtgcccacgctgtggaacgagccggccgagctgccgtcgggagaaggccccgtngagagcactagccccggccgggagcccgtggacaccggtcccccagcccccaccgtcgcgccaggacccgaggacagcaccgcgcaaggancgcttggaccaagggcggcgggtcgctggggcccggcgctaatcgcggccaatcgtgattcgccgccctgctggccaccttgcgttggtgcttggcgntcgttggttcgttcgcgcttaagaaagtttttctggccttcttgaagcgaataaaagggggccgcgcccgggccgccgggcgaacttcgggcttgcaaaaaaaaaaaaaaaaaaaaagnttggggt

SEQ ID NO: 1184 - DNA, 573 bp, Homo sapiens
  Genbank Accession No. W37770
  misc_feature (1)..(573): n = a or c or g or t
cgaagccacgtctccaggtcctgacctggccttcctgacttcctgtcctgacaagaacaaagtccatttcaacccgactggctcagccttctgccccgtcaacctgatgaagcccctcttccccggcatgggcttcatcttccgtaactgcccctcaaacccgggatctccccttcccccggccagccccaggccaccacctcggaaggatccggaagcctccaaggcctccccactgccattcgagccatggagcgaccccaccatcagaagagcctgtgcttttccagagctccctgatggtctgagggtcccaccccatgccccactttaccatagagaccagtgccttggtggcaggtccctccccaggtcccctgagatggggtatggaggggcccttccctctcggccttcgagcactttctttcacttactgtgtcaaagccctggggtcctttttttgatgggcancgggccctctgaacgtgatgggaactggccttctccaatagtagctgggcagctcacaattcacacctgtgtaactggcaaaatcctcaattgggtgga

SEQ ID NO: 1185 - DNA, 559 bp, Homo sapiens
  Genbank Accession No. W37896
  misc_feature (1)..(559): n = a or c or g or t
tttttttgacacacttacttaatgtgtttattcaaagtaagagtctttatagatcttttcactaattaaatacagttgggtgtctgctgaatttcccttgaaaacattttgaagtgaaaaaagtcagtactgagtactgtacatttgtgttngattaacatttggacacaaatatacttttaacaccaatagagctgaaagactatgcctttatcttggatttcatagatttccccttccccccagtgacttatcttacaacggcaaacaccagcaggcaaaggggatctgtagaaatgtgcaccctggtttcctcctccatctcttctaccaatgtgggaagaaagccaatgcttcccagcactttctgaaggtggaatctcctcctctttacttaatgttggagaaaagtggccaccagtactcgatcattgtagantccggaatcncgccatctaaaccagacttcaaaaggtggcactttncgggtctaacttaggttangaaaggnggaattnatgggaanggatggataaangtgggtttaagccaaagcccn

SEQ ID NO: 1186 - DNA, 599 bp, Homo sapiens
  Genbank Accession No. W44656
  misc_feature (1)..(599): n = a or c or g or t
accaactttagtacagtatatttagaagaaaatattctcatttctgatcttgagaagagtgaccaataataatgaggtcagagaatgccacagacaccaggtatacagagcttggtaggagctggaaacccgactcacagatttaggaaacagtgggttcttgtccctgtggacatcagaacttgggggacggagagatagagaaccagaaggcagaacaaggaaaaactcaaagaaaggaatggggaggaatggaaacgtaacaggacatgttgcctcagtgagtcaccaagggctttggagttctttagcccaaaatgtggttctgtggaggctgaggacaaacttcaggacagagcatgccttaaatcgatgttgctaagccactggttccgggcagtccttaagcaagggctcctctgattcagacaaggaattgttttccttcccttttactccagatgacacctaaangtgcaaaagnaaaccatctctgcacactaaccaaacagacagtgcgtgaacgaagcagaaccctcctgaccacagccaaggacttgagagcttggtgnaactggtgctccaggtagaaattncct

SEQ ID NO: 1187 - DNA, 587 bp, Homo sapiens
  Genbank Accession No. W45581
  misc_feature (1)..(587): n = a or c or g or t
ggtggatgaggctcaccccggcgganganagggacgaggaggggcggacaccggaaggtccgggagtgtccgccataaagtcgtttgaggtgaccgttgcgtaattttttaacttctagtcatggcgaatgatcgcaggagagcacagactggaccctgctacgatctctcttggagtggatcagactgatgatcaccaacaaccaactcattcccggataaggaagaagagagtgtcacctacttcagtgtggtttcaaccctacttctgcatcttaaagacactgtgtacaacgttggacactgtgcaggatgatgccacttcatcttggatgctaatctgccatgttgacttctgattaaccccaggcccaggaatgcctcaagatttctactttacttactgttgcttgtgtaagccaagacaaccttgatgttatcataaacatgtacttacctaagtcctgtcctttggcaaattatgggctatgagacacagcattctttgcctttccctgaaggggcaatttcagcgatcctacacattccttcttgaagcacttatgctcctttcgaaaatgggaagg

SEQ ID NO: 1188 - DNA, 451 bp, Homo sapiens
  Genbank Accession No. W48800
gatttcggcactaggttaacactggcccttgaaaatgaacttttggttaccaagaacagcattcaccaggcggctctggcagctttaaggctgaaatccggcatttgttggaacgagtcgatcaggtggtcagagaaaaagagaagctacggtcagatctggacaaggccgagaagctcaagtctttaatggcctcggaggtggatgatcaccatgcggccatagagcggcggaatgagtacaacctcaggaaactggatgaagagtacaaggagcgaatagcagccttaaaaaatgaactccgaaaagagagagagcagatcctgcagcaggcaggcaaagcagcgtttagaacttgaacaggaaattgaaaaggcaaaagcccattgaagaagaaccagcccagcctgccccctatcttgtcctggaatatttttggggttggaactca

SEQ ID NO: 1189 - DNA, 501 bp, Homo sapiens
  Genbank Accession No. W55924
  misc_feature (1)..(501): n = a or c or g or t
tttttttcacttatagccaatatttaataatcccatattaactgatgtgtaaaaaatgtctttatgatctgttaccacccaaaagaatgcatcataactttcaagaatatgttctttgacttctaacctctgctcttctttagaattacctttgctgcggccagtacatgctccttgttaatgactctacatttactcgcacaagcgtttgtcctggactcttctgctaatcgatgaacaaacagtaaacagttcagatggaccaataagtcaccacttttctccagacgaagttgaggcttctttcgcttgaagactcgctttagaaagccacggggagccttccgctttatctgcttcctctgggagactatggtcgacagcgccatcctctctgtcaagtaccagctgcctcagcttccgaggtgctctctgtatcgcacacaagctccggggacactggggccagcggaaaacaatccggtccgtatgangcttctt

SEQ ID NO: 1190 - DNA, 620 bp, Homo sapiens
  Genbank Accession No. W56090
  misc_feature (1)..(620): n = a or c or g or t
ctctgaggagacaaggtgaggtgcaggttcctgccctaaagaactctatcttttgagattagcaactaacagtgtgagcccactaataggatgtgaaagttgtcaaaatcaagttctggtcattgtgttaaaaatcctaacaaatagagctggggaaggccgtgaaaggacgattttcatgcacagatgtctgataatgaggactatcattaaaagactgcacaaaaccacaccttgcacaaaggccatcacaacctgacacacacaaaaaatacttctatgaggacatttgcccagcaactccctgtccaatgtccaactggcaacatccttgttattgatccttgtagccaaggataattctctcaaaacaatcatttttgctttaaaaaccgttgtcttccttggacctccctggtatatggcacatagttttactggtgggcacntggtaatcctaantggcnatggcctacttcccggnattaaacatccanttttcctttcaagaagaggtctnccctccccngggtaatttaaggctggacnaaggggtatgnccaagaagntagccttgggatataggcaggttaaanctggcccnttaggggtaagtggan

SEQ ID NO: 1191 - DNA, 786 bp, Homo sapiens
  Genbank Accession No. W61005
  misc_feature (1)..(786): n = a or c or g or t
gctggtcagaaagccatttaatccataaacacaaagacacatgaatgggcaaattctgtaaatgaaagcaatctggcaaaagcccttggtggtgagcttggtctccctcacaggcaatgacagtcttggccatgggtctagacaacacacaattccaatgcagcctaggaggacattatggaagtgagctgggagaaccaatgatgcagaaagtagactcaggagaggcacagagaatgcaccccctgccccaagtgcagtggatcagagagctcagaacagagaagagatgcggactcatggcctctcgtagcctagcctagagcacacttactgctcactatcttattgtccatcattttaagtcaaacatccccagttcagtgagagtgtacattctccaatattacacacataaggaaagatggggtaaccctaaagcctgaatgagaaaaagcttccaggagctgtttttcagatacaccaacatatatttgccaggnaggcactgtgtttctccaggcaggcggtaangctttgacanggttccaggaagacacatagcagccagagagttntcaagcccaacctgntccacacagagcaacatgtaccngttaatattactattgcccncgtccgatttttgctcgnggcaattccctaaggggncgattaatcggaccagccaagcngtcccggggaattntccgcccaatcccaaaatttgncggantaatntacctgggcctaaggggcccccaantgtgggcccccctttttgga

SEQ ID NO: 1192 - DNA, 662 bp, Homo sapiens
  Genbank Accession No. W63684
  misc_feature (1)..(662): n = a or c or g or t
tttttttaaagcttaaaattcatttattgtagtgagcaagtttgtaatgaataccagcaggtggtgctcaagccacagttgtctaagacactgggtttcacaggaagttaatctcaatctcagtatatgcaagtaaactgactcattcctgcttccagtgggaacaatttttcagttaaatcttgcttccttgcatgtcaagaattctctactggtaaatcttacaggtgtcaactttcattatcagggcatctattggccatctattaaaggccttacctgttttttctgtcatccagcaaatcttagactatttacttgtgtaaacattagatagcaaagaaactaaggacaaaaatctctagttcaatttagacttgatacctcagagcactggctgatgggaaggcattttatctaattcagactcagatgagggaaaacgataacacttcattacagacttgtctatggccattccagtaccttgaacttgagcaatacacattgccagtcctttaagangccttactcttgggctgcttactcctgctanaaggncttaagacacatgtcctggccagcatggtgnccagcctctcncaatntggcctgcctttaaccttaagagccccggattatagaagtttttaattaagagg

SEQ ID NO: 1193 - DNA, 593 bp, Homo sapiens
  Genbank Accession No. W68034
  misc_feature (1)..(593): n = a or c or g or t
attacaggcatgagcaccatgcccagcaggtcaactgtttttgcaagcatttagccagagtcatgctgtgctgttaatcagtgtcctggagaatgggttgcttggaaatcttggcgccccctcagtagtaacagccttggtttaagggcgcagagtggagagtaaatgcaagggctataacaagggcattcatgctgtgggttaagatccacaaatcgctaggaatgtgtatactctgggtagtaagtttgtagtattagaaggtttaatgacaagtatttgaagagctgaacgttaagtgttgggaggccatcccttatgaaggacaatgaatggcaagtaaaagaccaagttctgttcctgggtccattaatttagttaaaaaggcaaagttctttcagcacacatatctgcatgcagtcacgtgctgcctaaggatgcttcattccaccatgagcctcacagccgtgctacaccataagatnatactgtaattttacnggtaccctttaacattgtggttacaatggccacaagaagcttgtgtngatggccttgaatgtggncccacccgactaataattttgctnaat

SEQ ID NO: 1194 - DNA, 613 bp, Homo sapiens
  Genbank Accession No. W68504
  misc_feature (1)..(613): n = a or c or g or t
aaggaaagacatatgaaaggaattgtaattggcttaacagaaacagtctgtaaaaacctaacagtggtgcaatcatgttgtctgtgttgtgttatgtgagaattttctcctaagtcatgcaggtaatgacaatatactgtaaataccacatgtgagtttacctgaatctgtgcattttgtgccttattcatgagaatgatagaagtactaaaatctgtcaagtgttttcagtatagcacattatttactgagtgccagttgtaaatgtttttcaaccagcacctaaaaagactcttttcaaaaaatcacagaaacaacctaggacaattatttgttacataatcccgacctcatagcagcattacattctttgccgtgataaacattccactcttgctttcctaaggatgaaacagtgataatgtgaactccaatggaggtttcctggggtaatgtgacacctgcagaaactatagagcgtcatttatacgtagtttggcagaaccacttacggctgatgatgcgcanccctgctgactggttcaggtnatatgctggacaccacacacntggttagtganccaatctaggaagtncccagggcggaggttgg

SEQ ID NO: 1195 - DNA, 541 bp, Homo sapiens
  Genbank Accession No. W72062
  misc_feature (1)..(541): n = a or c or g or t
tagcttcaacacagcagaaatttatttcccacccaggtaaggggaccctgaggtaggcagtgacttctgtcggcagcgagctaggcccctctcaccaggctgccctaccgtgctcagtgctgcctcatggtgcaaagtggttgctgagctccagtcatcacttcagccagcagaaggaggaaggagaaggagaaagacgtgaccccaccatctagggcatttgctctccgaccccccagctaggcattgtgtgttttattaataaggaaaagaagagaacagttagcggaggcctcccgctgtccaccaggatgaactttggcaggccggacaggactctgggcttcccagttaatggagtgttgaactgggtggggatctaggggttctttaagtctcactctgtacttctcagaaggggaaactgatacccaagtcagtggctgagctgtggcccaggctcggcctctgcctgctgtcccagaagctctgtcctggcaccagctactggtgaaangcagagcttgcaagccctcgtgcc

SEQ ID NO: 1196 - DNA, 564 bp, Homo sapiens
  Genbank Accession No. W72182
  misc_feature (1)..(564): n = a or c or g or t
tttgctctctggcctctttattcccatctccttaggctgaccctgacaagtgccagggccaggcttggaccaagcagtcaactgagtcagcctgccctgggaaccagcagggcgagggagcttacggacgggctaggctcaggagagtaagagagagcagatgaagggcagaagtccgtggccgcagagnagctgagcatgagggatggagcgtgctgctgtcctgcaggtgccgttagccctgttttgcactggtggattgatctgctcaggcgcacagggagatggcacagcaggacccgccgcccagcctcgctgagggcatgctcccgcctcacctccagaggctgttgggcggaacgaagaagctgcagcagtttggggccagcgtgggactggaggcccaggtgaatcttgtggggcaggggacggagctgaggctgtccggcccgggcctccccacccaaangccctagaaccctagccttcaatcctgggggtttgcttctcccctgagtcctggctttcctgacctgccgtccgttaaggacaagttggaagggc

SEQ ID NO: 1197 - DNA, 631 bp, Homo sapiens
  Genbank Accession No. W72194
  misc_feature (1)..(631): n = a or c or g or t
tcaattctgaataaagtttattaaataatatgtacagcaaatgtagtaattcaacacatctatttatcaaatcaatccactgcaatgaagaaaaataaatgaacagaaaaatctatgtctgcataggacatgctctcagtgtgtaatttaaatggcaatactttaaattaattggttatatataatgtcagttatttttctttcagaatataatcttttttgtagtaacctattctagcaataggacttaatacgactgcagataaatagggactgcaaaaaccaaaaacccaaaataatgaaattaaaaaggaaaaaaaaactgtaactgagatcatagttacctttcctccccaatagaatacttatcgtaaattttaacactttacaatggccatttttgtgctaaaaatctgtaggtgagttatttggaattccttcatttaaatnaaaatgcnaaaaaacttcatgacttccctttaccccctccantccaattnttaangttatttttcccatccaggnagggacatgggcnatccaagttanatatccnatttacagtccacttcctagcccattattttttttttccttcccggccccgggggcccgccaaggtaggggtngg

SEQ ID NO: 1198 - DNA, 596 bp, Homo sapiens
  Genbank Accession No. W72338
  misc_feature (1)..(596): n = a or c or g or t
tgattgtattcaaatttttattttttgaacaaaaatttaagacaatgattttaaataataaaacatggtatatattctagacactggttttttttaaagatttattaaatttagactcctatagttctgttgtgatgctttcttcaacatttatattatttcttaccattttatcatcactccaagcttgctaaacaaagaatctctctgttaagtgaagttttacattaaggaaatactccactagcacactgaacaaacctacagaactgtcctagtttatatttacaaaacacaagaagtcttgtccagccattttggttttcgttgttacactgtccatactgagatcagcagagagctaagtaatacacaagattacgcttcggcagtgcaaaggatggcatcaaccaaacttcattaaacagaccaacaagtacaaacatggtgagcaaagttcaactcaggtaatagtggattaaaaaccaaacatgtagtggggtcacaaccagactgggtttcactggtgcactttccccngggaataatacccattccncagaaagaagggatatgcatcccagccttggtcattt

SEQ ID NO: 1199 - DNA, 588 bp, Homo sapiens
  Genbank Accession No. W72347
  misc_feature (1)..(579): n = a or c or g or t
tcttgcaactgcaattttattttcttttgtgaaaataaacaactgggagtttaaattgctccaaaaaccataaaaacaaaaagaaatacacacagaagaagcatgtgaggtgatggggaagggaacagggtctctagaactttggcagattgtgctnggcacggacccaggtgacaggagccagaccatggggccggtcccgcctgccactctgggattgtgaagggatgatcgccactggaatggacggggaggaacacagacttcttcgctgaggaagtggcaggcaccttgagtccctttaaatgcgggggttcgggaggaaaccatttcagaggaccgctttctccactgaaagctgggggctggcgagttcgggcccactnagggaggggacgctggtggcagcaaatcaggccaagatgtcttctcacatggtgatgggcctcacactgggcagaggacagaggacgaagaagaacccacggtattgagcagacgatgaaaacttgggctgggtaacaggaaatgtcacaatggcagactgcagatggaatccggggaactgggcaagccgcagggcgaaaa

SEQ ID NO: 1200 - DNA, 651 bp, Homo sapiens
  Genbank Accession No. W72407
  misc_feature (1)..(651): n = a or c or g or t
ggncgcgcctgtggncctcnacggcacccgaacccaccctgctgggcggtgttgagcccccgccgcggncatttcgntnggacctggactgggagcggggccggtggctctctacgacggccgctcactcgacctgctttacgccttccaggccntggccccctggggagcgcatcttcccgctgttctgcacctgcgaccctcgtgctccgctccgcattgtaccagcggaaagtgagtctcgtctccaactagaagtttggcccggcactggcctgcagctgctttttgggggtggaattccccactcatttctgggaacacattcacacgcccattgcaggagtattaatagcaacccacattttcgccccaaaataatgagacctcacctggtctccacgtttccacgtccctgctcaaaaccaaatccattcctggccttctggctctcagaatcttctctcccctacagctactacagtactttcctgacttctcccattcaaacaattctaaggctgcaatgggggaanaggccctcccatcagtattggtaaagtgaacatgaattcctanatagaagntctggtgggtaaaaanttgaatccaattaagcttcgtggcgaatttttggctcganggcaaatt

SEQ ID NO: 1201 - DNA, 601 bp, Homo sapiens
  Genbank Accession No. W72511
  misc_feature (1)..(601): n = a or c or g or t
gccacacaacaaataaaacaattgcagtaacaaaaatatgattttataaatgttcttatactaaaaataaaagcaaaaatatgagatcatgcactggagacaaaagctaaaaatgaatagttataacaaagaaagacaatattccaaaagattaaaatgttcaagtattgtgagaggaaaggggagattcaaaatagaatgggttcagaataagtcaattatatttactaccttaggagagacactgacacaactgtttttatccagtaatattttatgccattagaacacatactgttatccatttaaaggacagattccatttccttnggagcatgtttcatactacaaggatgggaataaaatttattggtttaccataatttataagtagataataatattgtgagagaaatattctccggaacaggccagtgtgatgggcngggaatagtagggggcngggagtcnggaaacctttggacctttaattccnggttttcatcattggtcccataaaaaggttccatttggagatagtcntcctaattaattanccttccaagatccccngtggccggaatcnttggccccggggggg

SEQ ID NO: 1202 - DNA, 514 bp, Homo sapiens
  Genbank Accession No. W72919
  misc_feature (1)..(514): n = a or c or g or t
tccccatgtagtttttaatagcatcccgcttcatactcagaagtgtcccagggtggacaagacattgtgtggcacccttgcaatggcccgcgctgagcagtgggagtaggggatngnnnnnncngggggcaggtgcctctccactcaccttcccagaaggccccacccacctccctcagcaccatctccagtgggtggggcaacatctgtcctggnctcagnttgcccaagacaccatttgctcacggaggccaccantgccccaatatgtacttcccgtttcggaaccaccaagctctggggactggaatgcaggcagtggaagccccagattgacttaacctgttgacagatcttcagagaaactgctggtaggaaggcagctgggtaaggtggcgatggcaagtgggaaggcaggccttggcccagagccactgtggtacaaagaggaaatttgacagaagagcagcctcgggnaaaacggggganccaggggngcaacggggggaaaagt

SEQ ID NO: 1203 - DNA, 570 bp, Homo sapiens
  Genbank Accession No. W73230
  misc_feature (1)..(570): n = a or c or g or t
ttttagtttgaaaggctctttaatagcaagcgaatggtaattacatggtcggatgaggtcctcactctcaggggagggaggagggagcagaggtggacatggtgcagtataggatttacactgtttgaagcatctaacgaagggcaacagtttttggcaacccaattcacagttttgtaatttacaagagatttctttgaaaggaaataggaaggcaaagaaagcacacataccctaccggcaacacttcttgcctaaaaaaaaaaaaaaaacaacaaccaaaaaacaaaaacccaacaactattccttgcttttgcttcttgtgtagatgactaaattttgctctcatgctcaaattaagactggatcacggatagtgaagatctgccctagcattgaagatttacttcctcctcttcagagctgacatttgtactgcgcactactcttatctttatctgcctaggtgtcagaaggggcttagtaaaaaatgaaacttgagaaacaaaacaaaacagaaaaccagggaaaggcagtttacaaagaccagctgtcantttccccgtgccg

SEQ ID NO: 1204 - DNA, 418 bp, Homo sapiens
  Genbank Accession No. W73386
  misc_feature (1)..(418): n = a or c or g or t
gaaggtcattcttgcgatgggtttattgcaggagatgatggaccaaatggctctgacacatgcacacgctcctgggcacgcctgctgcgngtncgcttcccatgacccccagggccctctatgcctcccccccagggcaccctgcccacttgcccccacttcatgtaccaccaagccctttccttttctgggcaccactcctgagcagcgtgaccagcggcctccaagtgcatgtggctcagaacataaaagcatcttcaacattcgtcattgagccaaacgaaacacagtgtttggctcaagagccggcgacactngcatccctatccacacgtggaacctgcccttgggcttngttgaccggaggatnggccgctcttccttgtcatccagcanccggagcatgtatgtgcccaga

SEQ ID NO: 1205 - DNA, 597 bp, Homo sapiens
  Genbank Accession No. W73819
  misc_feature (1)..(597): n = a or c or g or t
gtagttttgggcaaaacattcactgttctgtttcagcatatttccttggaacatcttcatctctttccattttgcggacactccccttcttctattctcctttactcaaaacatatggtttagacccacatcatggctttcttgtgggaagcctggatgggactaggaaaacacatgtttccaacatggtgcatatctgtttgtgcagatatcagacaagatttaatcttgtctaacttatgcgtattgttttgatgtttgcctgtggttattctgggcacagcaatggtggacattattgaaaatgaactttattggcagatgaaagataatagaacatgaagatttatgaactaccataagctctgcatctctgggtcttcatttccaaagcagcacttggaaaaccaagcccagttcaggcaaagagttcctttcttctcaccagcacttgaaatggtccagaatatacctgatgctcacaccacttcctcatccacttctgaaatgaaaaggtcattcccaatggttgctatacttttccaagaggacttcccttcttaaaatctgaaaatccttccattcancactgaccgg

SEQ ID NO: 1206 - DNA, 677 bp, Homo sapiens
  Genbank Accession No. W73855
  misc_feature (1)..(677): n = a or c or g or t
tgaacatgaagccggccactgcctctgctctgctcctgctcctgctgggcctggcctggacccaggggagccacggctggggtgcggaccgtcatcactgcagaaacgtgcaggcagagcgantcagaactacaattacaaccagcatgcgtatcccactgcctatggtgggaagtactcagtcaagacccctgcaaaggggngagtctcaccttcttcctcggcttcccgggtgcaacctggcctgctgcagtgggtgaagttttggtaggcaatttcttgcaaccaccaccgaggccccgaaaagcactggtcgtcagggagctcctccccttggcccccagcctgtgccagccctggcccggctgccacacctctgtttcctaggctggggacccagcttgtctctccttgtttcttcccactgcactgtggtnttcagtggccaccagcctcgtcacatacaccagcattttctgtactctccctttggtgactgaagtactgtgacagttctcaggaaggagganttctacttttgagttntctgtggaaataaaacatgaanttgtttcctaaaaaaaaaaaaaaaaaaaaaagtggggcgaanttttccctagtngggtaattagttgatgcgtgtttnaagcgnatggnaactgggtccaattaacctt

SEQ ID NO: 1207 - DNA, 570 bp, Homo sapiens
  Genbank Accession No. W73890
  misc_feature (1)..(570): n = a or c or g or t
ttcacagacaggaagtaactttaattaaatattgtgaaagttgaaaagtttttacagcttgaatttttgcaaaaaaaaaaaaaaaatttaacaatctctacagtagttaggttctctaacaattgaactgtacagtgtgtgtctattcaaaaagttttcgataagaaggtgaaaggttagtagatttagagatgacttcatttaagctgcatcctagtacaatgtgaggccagggcaatgttatgcaatccagtcatccagaagctgtattttttcccccaacactgaaatcttaatttaattcttcatttcattttcttcttaaagccatattctgtatttaggggaacatcttttatttgtaaaacttttgtggagaagaaagaggatcagagggccagaatgtcttttcatctaatcnatagaaatagaagccacaaaacnccaattatacncattttaaaggcnccttggaccttcaagaagagntctaaccactggcacatgggctgacagatggggtagtgtcngttgtcaaggtcnagccgggcaccttnccgggctggccgt

SEQ ID NO: 1208 - DNA, 446 bp, Homo sapiens
  Genbank Accession No. W78050
ttttaaaaaaaaactacatctctttattgcagaatttatacttgtttgaaaaatacaaaatgtagcgttgataagattgaagcatgttgaaaggtaagtacagggaaaggtcctttcagaatgactgcaacagtgcagcaaggattcccattccccgcctaaaggacaatacctttttaatagaaataaatgagttagttagttagatttttattacagattgaattaaacagttagttacaaagacattctctgatacattcattcatagaggtcttaacgtataaatacatagtaaatatcctataaaatcggtaggcaatctcatcgtgcattatctttttgtgctcagacttggacttcacattcagtctctacatacagcttgattagaatcataaaaacaatatgaagacgattgcataaaggggatagtttgaccaaag

SEQ ID NO: 1209 - DNA, 497 bp, Homo sapiens
  Genbank Accession No. W80496
tttctttttttttttctttttcccctttctttttctttctttctttctttttctttctttctttctctttctctctctcttttttctttttctttaaggtggggaaagagacaaccaagagacaggaagctgatctgcaaggattcggagttgtgctaaaaggactttgattttttttccccctttacgaacgctggcaattgacatcactacagacagcctggttagagaacaaactgcctcatcccaagtggaccccggcagctgggggaagccaggcaagatctgggaaggctgtgtgtgggtgttttttctacagatctcactcctccgccctttttttttttttcctttggtgtgtgttttttgttttgttttgttttttaaaaaaattcttgctgtgttggaactagcgagtggtggagtctctgaagcctcatcagtcaccgggactgtcaggaatagtggtttaagaggaagctcggctgggggactaa

SEQ ID NO: 1210 - DNA, 542 bp, Homo sapiens
  Genbank Accession No. W87690
  misc_feature (1)..(542): n = a or c or g or t
cgcagccattttttattccaaacatcgtatgtttttgtaaacctgacatttcccaaacagtgcaagtgaatcagaagtgactgcttagactttaatacacgtgacattgtgaggcagcacaacctccccccacccaccaaaattcctcagtcggaaatgtacatggatgcatcagtaaagttctggaaatgcagatagcgtgggtgcctgccaagcaattaatcactcgtaaagcttttaaactcactctggccagtcanacngngcacattnganttaaaacaacaacatcaacaangaaaaaaccttaaacacagtctgaaatctagatcattgtgctataaagcattgcacgatgttgggaaatttgttcacttattccccccatgtgctgaaaattcagaagacatcctagaagtttcattttgggccctactgggctctgtattctcccttcagccactctttgaatattctccactggngtatattaattattctatatatcanaatatcagctaaaagtgtggcatactaaagca

SEQ ID NO: 1211 - DNA, 520 bp, Homo sapiens
  Genbank Accession No. W88427
  misc_feature (1)..(520): n = a or c or g or t
tcaccagattgtactcctaaaacttaacaggccatcacaagcaattgtcttttgtttacaagattgatttaatatgagaggatacaaaatgtcatcgttatcctctcttatgaacaactgtagtcnaaataaggtggcacaatttaattgttttgtatcagaaatacactgacccaccttttattgagtcctgccacatgttaggtaccgtgctctgctgtggagacagagcagtgaccccaaggagctcacggtccctgaaggaggtgctagagaagagacttagcttctgatactgccaatttaatgtgagaacatggggtatactgcatcatttccattttcatcaataacatatgttttatgcaccttctttacctgaaacttactaagaatctaccagtaaacaaacatcctgtctttttgcaagtatgaatcacttaacctgctgatagttgaagaacactttaggagttttgtattcttgtatatagtntatttattccatgtgctagccagg

SEQ ID NO: 1212 - DNA, 515 bp, Homo sapiens
  Genbank Accession No. W89022
  misc_feature (1)..(515): n = a or c or g or t
aagtttatttttaacaacaaaaaaatctgtatttttctcctaaaaggtaccaaaatttgggcaactataaatgtttcattctatacttagaaataaaataaatggtttcttttttatcattatctgaaagaatnggattgtctggcttcttgaaatccatggcctcttactgggacaggaaaggcattggagttatgtccctagactagaaagagtatggttcatgaggtccctggccctctccataactctgcatttggtcactaaatattggtagaaaaagtatttgtccattactttacttgttccaccacctagagccaaagnatntagaaggtaattaatagtgatacggatagaatgcaagccacagtcacctccatccttctcaccatctctcaagcccatgtccttgacctttggtatttacatccatgtgacacgctctacctgaaatgtcacctttttccagcctgtcaaagttattcatccttcaacactgaggcagaaatgcn

SEQ ID NO: 1213 - DNA, 582 bp, Homo sapiens
  Genbank Accession No. W92110
  misc_feature (1)..(573): n = a or c or g or t
ggcacgagtctgaatgacgttacaccctcaccttcttttcctggccctgtctctggactctcccctgtgaggcccaattccaagacagactctcgtcctcaccgaagcttaggcccacatctcccaggctgcttaggagacagaatggaaacggaggccgcccctgccagccgccctggcctggtcactgcatgatccgctctggtcaaacccttccaggccagccagagtggggatggtctgtgactgctgggaaggcaggctgatggggcacacccttggcctctcgtccacgaggggagaaacctaaaccctgtttcacaatctgtgcggaagtagcttgcctcacttctgcttaggaaagcggctgttgctccataactctaaccagcacagggctgaggctgcagtgcacanntgcagggaggcccttcccaaggtgtggtgactgtgccttactgtacatgctcggaggnctggncattataaggagggttgggtgatgctgaaatcancccgatctttaagtaattaatttctggagtaatcaaggtggaaatccatagacaaattgaaaaaaaa

SEQ ID NO: 1214 - DNA, 882 bp, Homo sapiens
  Genbank Accession No. X00129
cggccaggcttgcgcgtggttcccctcccggtgggcggattcctgggcaagatgaagtgggtgtgggcgctcttgctgttggcggcgtgggcagcggccgagcgcgactgccgagtgagcagcttccgagtcaaggagaacttcgacaaggctcgcttctctgggacctggtacgccatggccaagaaggaccccgagggcctctttctgcaggacaacatcgtcgcggagttctcggtggacgagaccggccagatgagcgccacagccaagggccgagtccgtcttttgaataactgggacgtgtgcgcagacatggtgggcaccttcacagacaccgaggaccctgccaagttcaagatgaagtactggggcgtagcctcctttctgcagaaaggaaatgatgaccactggatcgtcgacacagactacgacacgtatgccgtacagtactcctgccgcctcctgaacctcgatggcacctgtgctgacagctactccttcgtgttttcccgggaccccaacggcctgcccccagaagcgcagaagattgtaaggcagcggcaggaggagctgtgcctggccaggcagtacaggctgatcgtccacaacggttactgcgatggcagatcagaaagaaaccttttgtagcaatatcaagaatctagtttcatctgagaacttctgattagctctcagtcttcagctctatttatcttaggagtttaatttgcccttctctccccatcttccctcagttcccataaaaccttcattacacataaagatacacgtgggggtcagtgaatctgcttgcctttcctgaaagtttctggggcttaagattccagactctgattcattaaactatagtcacccgtg

SEQ ID NO: 1215 - DNA, 1761 bp, Homo sapiens
  Genbank Accession No. X00351
ttgccgatccgccgcccgtccacacccgccgccagctcaccatggatgatgatatcgccgcgctcgtcgtcgacaacggctccggcatgtgcaaggccggcttcgcgggcgacgatgccccccgggccgtcttcccctccatcgtggggcgccccaggcaccagggcgtgatggtgggcatgggtcagaaggattcctatgtgggcgacgaggcccagagcaagagaggcatcctcaccctgaagtaccccatcgagcacggcatcgtcaccaactgggacgacatggagaaaatctggcaccacaccttctacaatgagctgcgtgtggctcccgaggagcaccccgtgctgctgaccgaggcccccctgaaccccaaggccaaccgcgagaagatgacccagatcatgtttgagaccttcaacaccccagccatgtacgttgctatccaggctgtgctatccctgtacgcctctggccgtaccactggcatcgtgatggactccggtgacggggtcacccacactgtgcccatctacgaggggtatgccctcccccatgccatcctgcgtctggacctggctggccgggacctgactgactacctcatgaagatcctcaccgagcgcggctacagcttcaccaccacggccgagcgggaaatcgtgcgtgacattaaggagaagctgtgctacgtcgccctggacttcgagcaagagatggccacggctgcttccagctcctccctggagaagagctacgagctgcctgacggccaggtcatcaccattggcaatgagcggttccgctgccctgaggcactcttccagccttccttcctgggcatggagtcctgtggcatccacgaaactaccttcaactccatcatgaagtgtgacgtggacatccgcaaagacctgtacgccaacacagtgctgtctggcggcaccaccatgtaccctggcattgccgacaggatgcagaaggagatcactgccctggcacccagcacaatgaagatcaagatcattgctcctcctgagcgcaagtactccgtgtggatcggcggctccatcctggcctcgctgtccaccttccagcagatgtggatcagcaagcaggagtatgacgagtccggcccctccatcgtccaccgcaaatgcttctaggcggactatgacttagttgcgttacaccctttcttgacaaaacctaacttgcgcagaaaacaagatgagattggcatggctttatttgttttttttgttttgttttggttttttttttttttttggcttgactcaggatttaaaaactggaacggtgaaggtgacagcagtcggttggagcgagcatcccccaaagttcacaatgtggccgaggactttgattgcacattgttgtttttttaatagtcattccaaatatgagatgcattgttacaggaagtcccttgccatcctaaaagccaccccacttctctctaaggagaatggcccagtcctctcccaagtccacacaggggaggtgatagcattgctttcgtgtaaattatgtaatgcaaaatttttttaatcttcgccttaatacttttttattttgttttattttgaatgatgagccttcgtgcccccccttccccctttttgtcccccaacttgagatgtatgaaggcttttggtctccctgggagtgggtggaggcagccagggcttacctgtacactgacttgagaccagttgaataaaagtgcacacctta

SEQ ID NO: 1216 - DNA, 7680 bp, Homo sapiens
  Genbank Accession No. X02761
gaagagcaagaggcaggctcagcaaatggttcagccccagtccccggtggctgtcagtcaaagcaagcccggttgttatgacaatggaaaacactatcagataaatcaacagtgggagcggacctacctaggtaatgtgttggtttgtacttgttatggaggaagccgaggttttaactgcgaaagtaaacctgaagctgaagagacttgctttgacaagtacactgggaacacttaccgagtgggtgacacttatgagcgtcctaaagactccatgatctgggactgtacctgcatcggggctgggcgagggagaataagctgtaccatcgcaaaccgctgccatgaagggggtcagtcctacaagattggtgacacctggaggagaccacatgagactggtggttacatgttagagtgtgtgtgtcttggtaatggaaaaggagaatggacctgcaagcccatagctgagaagtgttttgatcatgctgctgggacttcctatgtggtcggagaaacgtgggagaagccctaccaaggctggatgatggtagattgtacttgcctgggagaaggcagcggacgcatcacttgcacttctagaaatagatgcaacgatcaggacacaaggacatcctatagaattggagacacctggagcaagaaggataatcgaggaaacctgctccagtgcatctgcacaggcaacggccgaggagagtggaagtgtgagaggcacacctctgtgcagaccacatcgagcggatctggccccttcaccgatgttcgtgcagctgtttaccaaccgcagcctcacccccagcctcctccctatggccactgtgtcacagacagtggtgtggtctactctgtggggatgcagtggttgaagacacaaggaaataagcaaatgctttgcacgtgcctgggcaacggagtcagctgccaagagacagctgtaacccagacttacggtggcaacttaaatggagagccatgtgtcttaccattcacctacaatggcaggacgttctactcctgcaccacggaagggcgacaggacggacatctttggtgcagcacaacttcgaattatgagcaggaccagaaatactctttctgcacagaccacactgttttggttcagactcaaggaggaaattccaatggtgccttgtgccacttccccttcctatacaacaaccacaattacactgattgcacttctgagggcagaagagacaacatgaagtggtgtgggaccacacagaactatgatgccgaccagaagtttgggttctgccccatggctgcccacgaggaaatctgcacaaccaatgaaggggtcatgtaccgcattggagatcagtgggataagcagcatgacatgggtcacatgatgaggtgcacgtgtgttgggaatggtcgtggggaatggacatgcattgcctactcgcaacttcgagatcagtgcattgttgatgacatcacttacaatgtgaacgacacattccacaagcgtcatgaagaggggcacatgctgaactgtacatgcttcggtcagggtcggggcaggtggaagtgtgatcccgtcgaccaatgccaggattcagagactgggacgttttatcaaattggagattcatgggagaagtatgtgcatggtgtcagataccagtgctactgctatggccgtggcattggggagtggcattgccaacctttacagacctatccaagctcaagtggtcctgtcgaagtatttatcactgagactccgagtcagcccaactcccaccccatccagtggaatgcaccacagccatctcacatttccaagtacattctcaggtggagacctaaaaattctgtaggccgttggaaggaagctaccataccaggccacttaaactcctacaccatcaaaggcctgaagcctggtgtggtatacgagggccagctcatcagcatccagcagtacggccaccaagaagtgactcgctttgacttcaccaccaccagcaccagcacacctgtgaccagcaacaccgtgacaggagagacgactcccttttctcctcttgtggccacttctgaatctgtgaccgaaatcacagccagtagctttgtggtctcctgggtctcagcttccgacaccgtgtcgggattccgggtggaatatgagctgagtgaggagggagatgagccacagtacctggatcttccaagcacagccacttctgtgaacatccctgacctgcttcctggccgaaaatacattgtaaatgtctatcagatatctgaggatggggagcagagtttgatcctgtctacttcacaaacaacagcgcctgatgcccctcctgacccgactgtggaccaagttgatgacacctcaattgttgttcgctggagcagaccccaggctcccatcacagggtacagaatagtctattcgccatcagtagaaggtagcagcacagaactcaaccttcctgaaactgcaaactccgtcaccctcagtgacttgcaacctggtgttcagtataacatcactatctatgctgtggaagaaaatcaagaaagtacacctgttgtcattcaacaagaaaccactggcaccccacgctcagatacagtgccctctcccagggacctgcagtttgtggaagtgacagacgtgaaggtcaccatcatgtggacaccgcctgagagtgcagtgaccggctaccgtgtggatgtgatccccgtcaacctgcctggcgagcacgggcagaggctgcccatcagcaggaacacctttgcagaagtcaccgggctgtcccctggggtcacctattacttcaaagtctttgcagtgagccatgggagggagagcaagcctctgactgctcaacagacaaccaaactggatgctcccactaacctccagtttgtcaatgaaactgattctactgtcctggtgagatggactccacctcgggcccagataacaggataccgactgaccgtgggccttacccgaagaggccagcccaggcagtacaatgtgggtccctctgtctccaagtaccccctgaggaatctgcagcctgcatctgagtacaccgtatccctcgtggccataaagggcaaccaagagagccccaaagccactggagtctttaccacactgcagcctgggagctctattccaccttacaacaccgaggtgactgagaccaccatcgtgatcacatggacgcctgctccaagaattggttttaagctgggtgtacgaccaagccagggaggagaggcaccacgagaagtgacttcagactcaggaagcatcgttgtgtccggcttgactccaggagtagaatacgtctacaccatccaagtcctgagagatggacaggaaagagatgcgccaattgtaaacaaagtggtgacaccattgtctccaccaacaaacttgcatctggaggcaaaccctgacactggagtgctcacagtctcctgggagaggagcaccaccccagacattactggttatagaattaccacaacccctacaaacggccagcagggaaattctttggaagaagtggtccatgctgatcagagctcctgcacttttgataacctgagtcccggcctggagtacaatgtcagtgtttacactgtcaaggatgacaaggaaagtgtccctatctctgataccatcatcccagctgttcctcctcccactgacctgcgattcaccaacattggtccagacaccatgcgtgtcacctgggctccacccccatccattgatttaaccaacttcctggtgcgttactcacctgtgaaaaatgaggaagatgttgcagagttgtcaatttctccttcagacaatgcagtggtcttaacaaatctcctgcctggtacagaatatgtagtgagtgtctccagtgtctacgaacaacatgagagcacacctcttagaggaagacagaaaacaggtcttgattccccaactggcattgacttttctgatattactgccaactcttttactgtgcactggattgctcctcgagccaccatcactggctacaggatccgccatcatcccgagcacttcagtgggagacctcgagaagatcgggtgccccactctcggaattccatcaccctcaccaacctcactccaggcacagagtatgtggtcagcatcgttgctcttaatggcagagaggaaagtcccttattgattggccaacaatcaacagtttctgatgttccgagggacctggaagttgttgctgcgacccccaccagcctactgatcagctgggatgctcctgctgtcacagtgagatattacaggatcacttacggagaaacaggaggaaatagccctgtccaggagttcactgtgcctgggagcaagtctacagctaccatcagcggccttaaacctggagttgattataccatcactgtgtatgctgtcactggccgtggagacagccccgcaagcagcaagccaatttccattaattaccgaacagaaattgacaaaccatcccagatgcaagtgaccgatgttcaggacaacagcattagtgtcaagtggctgccttcaagttcccctgttactggttacagagtaaccaccactcccaaaaatggaccaggaccaacaaaaactaaaactgcaggtccagatcaaacagaaatgactattgaaggcttgcagcccacagtggagtatgtggttagtgtctatgctcagaatccaagcggagagagtcagcctctggttcagactgcagtaaccaacattgatcgccctaaaggactggcattcactgatgtggatgtcgattccatcaaaattgcttgggaaagcccacaggggcaagtttccaggtacagggtgacctactcgagccctgaggatggaatccatgagctattccctgcacctgatggtgaagaagacactgcagagctgcaaggcctcagaccgggttctgagtacacagtcagtgtggttgccttgcacgatgatatggagagccagcccctgattggaacccagtccacagctattcctgcaccaactgacctgaagttcactcaggtcacacccacaagcctgagcgcccagtggacaccacccaatgttcagctcactggatatcgagtgcgggtgacccccaaggagaagaccggaccaatgaaagaaatcaaccttgctcctgacagctcatccgtggttgtatcaggacttatggtggccaccaaatatgaagtgagtgtctatgctcttaaggacactttgacaagcagaccagctcagggtgttgtcaccactctggagaatgtcagcccaccaagaagggctcgtgtgacagatgctactgagaccaccatcaccattagctggagaaccaagactgagacgatcactggcttccaagttgatgccgttccagccaatggccagactccaatccagagaaccatcaagccagatgtcagaagctacaccatcacaggtttacaaccaggcactgactacaagatctacctgtacaccttgaatgacaatgctcggagctcccctgtggtcatcgacgcctccactgccattgatgcaccatccaacctgcgtttcctggccaccacacccaattccttgctggtatcatggcagccgccacgtgccaggattaccggctacatcatcaagtatgagaagcctgggtctcctcccagagaagtggtccctcggccccgccctggtgtcacagaggctactattactggcctggaaccgggaaccgaatatacaatttatgtcattgccctgaagaataatcagaagagcgagcccctgattggaaggaaaaagacagacgagcttccccaactggtaacccttccacaccccaatcttcatggaccagagatcttggatgttccttccacagttcaaaagacccctttcgtcacccaccctgggtatgacactggaaatggtattcagcttcctggcacttctggtcagcaacccagtgttgggcaacaaatgatctttgaggaacatggttttaggcggaccacaccgcccacaacggccacccccataaggcataggccaagaccatacccgccgaatgtaggacaagaagctctctctcagacaaccatctcatgggccccattccaggacacttctgagtacatcatttcatgtcatcctgttggcactgatgaagaacccttacagttcagggttcctggaacttctaccagtgccactctgacaggcctcaccagaggtgccacctacaacatcatagtggaggcactgaaagaccagcagaggcataaggttcgggaagaggttgttaccgtgggcaactctgtcaacgaaggcttgaaccaacctacggatgactcgtgctttgacccctacacagtttcccattatgccgttggagatgagtgggaacgaatgtctgaatcaggctttaaactgttgtgccagtgcttaggctttggaagtggtcatttcagatgtgattcatctagatggtgccatgacaatggtgtgaactacaagattggagagaagtgggaccgtcagggagaaaatggccagatgatgagctgcacatgtcttgggaacggaaaaggagaattcaagtgtgaccctcatgaggcaacgtgttacgatgatgggaagacataccacgtaggagaacagtggcagaaggaatatctcggtgccatttgctcctgcacatgctttggaggccagcggggctggcgctgtgacaactgccgcagacctgggggtgaacccagtcccgaaggcactactggccagtcctacaaccagtattctcagagataccatcagagaacaaacactaatgttaattgcccaattgagtgcttcatgcctttagatgtacaggctgacagagaagattcccgagagtaaatcatctttccaatccagaggaacaagcatgtctctctgccaagatccatctaaactggagtgatgttagcagacccagcttagagttcttctttctttcttaagccctttgctctggaggaagttctccagcttcagctcaactcacagcttctccaagcatcaccctgggagtttcctgagggttttctcataaatgagggctgcacattgcctgttctgcttcgaagtattcaataccgctcagtattttaaatgaagtgattctaagatttggtttgggatcaataggaaagcatatgcagccaaccaagatgcaaatgttttgaaatgatatgaccaaaattttaagtaggaaagtcacccaaacacttctgctttcacttaagtgtctggcccgcaatactgtaggaacaagcatgatcttgttactgtgatattttaaatatccacagtactcactttttccaaatgatcctagtaattgcctagaaatatctttctcttacctgttatttatcaatttttcccagtatttttatacggaaaaaattgtattgaaaacacttagtatgcagttgataagaggaatttggtataattatggtgggtgattattttttatactgtatgtgccaaagctttactactgtggaaagacaactgttttaataaaagatttacattccaca

SEQ ID NO: 1217 - DNA, 2532 bp, Homo sapiens
  Genbank Accession No. X03350
agtgcactcaagcagagaagaaatccacaaagactcaccagtctgctggtgggcagagaagacagaaacgacatgagcacagcaggaaaagtaatcaaatgcaaagcagctgtgctatgggaggtaaagaaacccttttccattgaggatgtggaggttgcacctcctaaggcttatgaagttcgcattaagatggtggctgtaggaatctgtcgcacagatgaccacgtggttagtggcaacctggtgaccccccttcctgtgattttaggccatgaggcagccggcatcgtggagagtgttggagaaggggtgactacagtcaaaccaggtgataaagtcatcccgctctttactcctcagtgtggaaaatgcagagtttgtaaaaacccggagagcaactactgcttgaaaaatgatctaggcaatcctcgggggaccctgcaggatggcaccaggaggttcacctgcagggggaagcccattcaccacttccttggcaccagcaccttctcccagtacacggtggtggatgagaatgcagtggccaaaattgatgcagcctcgcccctggagaaagtctgcctcattggctgtggattctcgactggttatgggtctgcagttaacgttgccaaggtcaccccaggctctacctgtgctgtgtttggcctgggaggggtcggcctatctgctgttatgggctgtaaagcagctggagcagccagaatcattgcggtggacatcaacaaggacaaatttgcaaaggccaaagagttgggtgccactgaatgcatcaaccctcaagactacaagaaacccatccaggaagtgctaaaggaaatgactgatggaggtgtggatttttcgtttgaagtcatcggtcggcttgacaccatgatggcttccctgttatgttgtcatgaggcatgtggcacaagcgtcatcgtaggggtacctcctgcttcccagaacctctcaataaaccctatgctgctactgactggacgcacctggaagggggctgtttatggtggctttaagagtaaagaaggtatcccaaaacttgtggctgattttatggctaagaagttttcactggatgcgttaataacccatgttttaccttttgaaaaaataaatgaaggatttgacctgcttcactctgggaaaagtatccgtaccgtcctgacgttttgaggcaatagagatgccttcccctgtagcagtcttcagcctcctctaccctacgagatctggagcaacagctaggaaatatcattaattcagctcttcagagatgttatcaataaattacacatgggggctttccaaagaaatggaaattgatgggaaattatttttcaggaaaatttaaaattcaagtcagaagtaaataaagtgttgaacatcagctggggaattgaagccaacaaaccttccttcttaaccattctactgtgtcacctttgccattgaggaaaaatattcctgtgacttcttgcatttttggtatcttcataatctttagtcatcgaatcccagtggaggggacccttttacttgccctgaacatacacatgctgggccattgtgattgaagtcttctaactctgtctcagttttcactgtcgacattttcctttttctaataaaaatgtaccaaatccctggggtaaaagctagggtaaggtaaaggatagactcacatttacaagtagtgaaggtccaagagttctaaatacaggaaatttcttaggaactcaaataaaatgcccacattttactacagtaaatggcagtgtttttatgacttttatactatttctttatggtcgatatacaattgattttttaaaataatagcagatttcttgcttcatatgacaaagcctcaattactaattgtaaaaactgaactattcccagaatcatgttcaaaaaatctgtaattttgctgatgaaagtgcttcattgactaaacagtattagtttgtggctataaatgattatttaggatgatgactgaaaatgtgtataagtaattaaaagtaatatggtggctttaagtgtagagatgggatggcaaatgctgtgaatgcagaatgtaaaattggtaactaagaaatggcacaaacaccttaagcaatatattttcctagtagatatatatatacacatacatatatacacatatacaaatgtatatttttgcaaaattgttttcaatctagaacttttctattaactaccatgtcttaaaatcaagtctataatcctagcattagtttaatattttgaatatgtaaagacctgtgttaatgctttgttaatgcttttcccactctcatttgttaatgctttcccactctcaggggaaggatttgcattttgagctttatctctaaatgtgacatgcaaagattattcctggtaaaggaggtagctgtctccaaaaatgctattgttgcaatatctacattctatttcatattatgaaagaccttagacataaagtaaaatagtttatca

SEQ ID NO: 1218 - DNA, 594 bp, Homo sapiens
  Genbank Accession No. X04470
gtcactcctgccttcaccatgaagtccagcggcctcttccccttcctggtgctgcttgccctgggaactctggcaccttgggctgtggaaggctctggaaagtccttcaaagctggagtctgtcctcctaagaaatctgcccagtgccttagatacaagaaacctgagtgccagagtgactggcagtgtccagggaagaagagatgttgtcctgacacttgtggcatcaaatgcctggatcctgttgacaccccaaacccaacaaggaggaagcctgggaagtgcccagtgacttatggccaatgtttgatgcttaacccccccaatttctgtgagatggatggccagtgcaagcgtgacttgaagtgttgcatgggcatgtgtgggaaatcctgcgtttcccctgtgaaagcttgattcctgccatatggaggaggctctggagtcctgctctgtgtggtccaggtcctttccaccctgagacttggctccaccactgatatcctcctttggggaaaggcttggcacacagcaggctttcaagaagtgccagttgatcaatgaataaataaacgagcctatttctctttgcac

SEQ ID NO: 1219 - DNA, 1050 bp, Homo sapiens
  Genbank Accession No. X05360
ggggggggggggcacttggcttcaaagctggctcttggaaattgagcggagacgagcggcttgttgtagctgccgtgcggccgccgcggaataataagccgggatctaccataccattgactaactatggaagattataccaaaatagagaaaattggagaaggtacctatggagttgtgtataagggtagacacaaaactacaggtcaagtggtagccatgaaaaaaatcagactagaaagtgaagaggaaggggttcctagtactgcaattcgggaaatttctctattaaaggaacttcgtcatccaaatatagtcagtcttcaggatgtgcttatgcaggattccaggttatatctcatctttgagtttctttccatggatctgaagaaatacttggattctatccctcctggtcagtacatggattcttcacttgttaagagttatttataccaaatcctacaggggattgtgttttgtcactctagaagagttcttcacagagacttaaaacctcaaaatctcttgattgatgacaaaggaacaattaaactggctgattttggccttgccagagcttttggaatacctatcagagtatatacacatgaggtagtaacactctggtacagatctccagaagtattgctggggtcagctcgttactcaactccagttgacatttggagtataggcaccatatttgctgaactagcaactaagaaaccacttttccatggggattcagaaattgatcaactcttcaggattttcagagctttgggcactcccaataatgaagtgtggccagaagtggaatctttacaggactataagaatacatttcccaaatggaaaccaggaagcctagcatcccatgtcaaaaacttggatgaaaatggcttggatttgctctcgaaaatgttaatctatgatccagccaaacgaatttctggcaaaatggcactgaatcatccatattttaatgatttggacaatcagattaagaagatgtagctttctgacaaaaagtttccatatgttatg

SEQ ID NO: 1220 - DNA, 1709 bp, Homo sapiens
  Genbank Accession No. X07696
ggtacctcctgccagcacctcttgggtttgctgagaactcacgggctccagctacctggccatgaccaccacatttctgcaaacttcttcctccacctttgggggtggctcaacccgagggggttccctcctggctgggggaggtggctttggtggggggagtctctctgggggaggtggaagccgaagtatctcagcttcttctgctaggtttgtctcttcagggtcaggaggaggatatgggggtggcatgagggtctgtggctttggtggaggggctggtagtgttttcggtggaggctttggagggggcgttggtgggggttttggtggtggctttggtggtggcgatggtggtctcctctctggcaatgagaaaattaccatgcagaacctcaatgaccgcctggcctcctacctggacaaggtacgtgccctggaggaggccaatgctgacctggaggtgaagatccatgactggtaccagaagcagaccccagccagcccagaatgcgactacagccaatacttcaagaccattgaagagctccgggacaagatcatggccaccaccatcgacaactcccgggtcatcctggagatcgacaatgccaggctggctgcggacgacttcaggctcaagtatgagaatgagctggccctgcgccagggcgttgaggctgacatcaacggcttgcgccgagtcctggatgagctgaccctggccaggactgacctggagatgcagatcgagggcctgaatgaggagctagcctacctgaagaagaaccacgaagaggagatgaaggagttcagcagccagctggccggccaggtcaatgtggagatggacgcagcaccgggtgtggacctgacccgtgtgctggcagagatgagggagcagtacgaggccatggcggagaagaaccgccgggatgtcgaggcctggttcttcagcaagactgaggagctgaacaaagaggtggcctccaacacagaaatgatccagaccagcaagacggagatcacagacctgagacgcacgatgcaggagctggagatcgagctgcagtcccagctcagcatgaaagctgggctggagaactcactggccgagacagagtgccgctatgccacgcagctgcagcagatccaggggctcattggtggcctggaggcccagctgagtgagctccgatgcgagatggaggctcagaaccaggagtacaagatgctgcttgacataaagacacggctggagcaggagatcgctacttaccgcagcctgctcgagggccaggatgccaagatggctggcattggcatcagggaagcctcttcaggaggtggtggtagcagcagcaatttccacatcaatgtagaagagtcagtggatggacaggtggtttcttcccacaagagagaaatctaagtgtctattgcaggagaaacgtcccttgccactccccactctcatcaggccaagtggaggactggccagagggcctgcacatgcaaactccagtccctgccttcagagagctgaaaagggtccctcggtcttttatttcagggctttgcatgcgctctattccccctctgcctctccccaccttctttggagcaaggagatgcagctgtattgtgtaacaagctcatttgtacagtgtctgttcatgtaataaagaattacttttccttttgcaaat

SEQ ID NO: 1221 - DNA, 1585 bp, Homo sapiens
  Genbank Accession No. X14850
acagcagttacactgcggcgggcgtctgttctagtgtttgagccgtcgtgcttcaccggtctacctcgctagcatgtcgggccgcggcaagactggcggcaaggcccgcgccaaggccaagtcgcgctcgtcgcgcgccggcctccagttcccagtgggccgtgtacaccggctgctgcggaagggccactacgccgagcgcgttggcgccggcgcgccagtgtacctggcggcagtgctggagtacctcaccgctgagatcctggagctggcgggcaatgcggcccgcgacaacaagaagacgcgaatcatcccccgccacctgcagctggccatccgcaacgacgaggagctcaacaagctgctgggcggcgtgacgatcgcccagggaggcgtcctgcccaacatccaggccgtgctgctgcccaagaagaccagcgccaccgtggggccgaaggcgccctcgggcggcaagaaggccacccaggcctcccaggagtactaagagggcccgcgccgcggccggccgccccagctccccatgccaccacaaaggcccttttaagggccaccaccgccctcatggaaagagctgagccgcttcagactgcggggcaagcgggccgcggctcccttcccctcccctcccctcgcccgccttcgccgcccggcctcgagtccccgcccgcccccgctcccgtcccgcaccgcctgccgcgtcggcctcgggcctgccctgtccgccgtccgccctccggtagggttcgggccttccggatgcggcttgggcgctcttcggggacctccgtggcgcggaagacccgagcctgccggggggaggccggcggcgccgcacctgcccgcctcggcgttcgtgactcagccgccccatcccgagtcgctaaggggctgcggggaggccgcagcaccttctggaagacttggccttccgctctgacgcagggccgaggtgggcagtccaggccgagagccggcggccctgaaggtgagtgaggccctcggcagctgcagccggggtgtctggtacccccccggcgtggtgcttagcccaggactttcagacggccgctggccgggaggctttggtgggagagacgcgatcgccgatttcggtctggcgccccttctgcggccgggacccaggcctttcacatcagctctccctccatcttcattcataggtctgcgctggggccgggacgaagcacttggtaacaggcacatcttcctcccgagtgactgcctcctaggaggacatttaggggagggcagaggcctgcagtttggcttcacggctggctatgtggacagcaagagtcgttttgcggaacgcgactggcagccaggcctgtcgggcccccgacgccgccccatttcccttccagcaaactcaactcggcaatccaagcacctagataccagcacaagtcggttaatccctgtctggactgagcctccgttggcttctgaactggaattctgcagctaacccttccacgactagaaccttaggcattggggagttttagatggactaattttattaaaggattgtttttttttt

SEQ ID NO: 1222 - DNA, 8224 bp, Homo sapiens
  Genbank Accession No. X15998
gctgccccgagcctttctggggaagaactccaggcgtgcggacgcaacagccgagaacattaggtgttgtggacaggagctgggaccaagatcttcggccagccccgcatcctcccgcatcttccagcaccgtcccgcaccctccgcatccttccccgggccaccacgcttcctatgtgacccgcctgggcaacgccgaacccagtcgcgcagcgctgcagtgaattttccccccaaactgcaataagccgccttccaaggccaagatgttcataaatataaagagcatcttatggatgtgttcaaccttaatagtaacccatgcgctacataaagtcaaagtgggaaaaagcccaccggtgaggggctccctctctggaaaagtcagcctaccttgtcatttttcaacgatgcctactttgccacccagttacaacaccagtgaatttctccgcatcaaatggtctaagattgaagtggacaaaaatggaaaagatttgaaagagactactgtccttgtggcccaaaatggaaatatcaagattggtcaggactacaaagggagagtgtctgtgcccacacatcccgaggctgtgggcgatgcctccctcactgtggtcaagctgctggcaagtgatgcgggtctttaccgctgtgacgtcatgtacgggattgaagacacacaagacacggtgtcactgactgtggatggggttgtgtttcactacagggcggcaaccagcaggtacacactgaattttgaggctgctcagaaggcttgtttggacgttggggcagtcatagcaactccagagcagctctttgctgcctatgaagatggatttgagcagtgtgacgcaggctggctggctgatcagactgtcagatatcccatccgggctcccagagtaggctgttatggagataagatgggaaaggcaggagtcaggacttatggattccgttctccccaggaaacttacgatgtgtattgttatgtggatcatctggatggtgatgtgttccacctcactgtccccagtaaattcaccttcgaggaggctgcaaaagagtgtgaaaaccaggatgccaggctggcaacagtgggggaactccaggcggcatggaggaacggctttgaccagtgcgattacgggtggctgtcggatgccagcgtgcgccaccctgtgactgtggccagggcccagtgtggaggtggtctacttggggtgagaaccctgtatcgttttgagaaccagacaggcttccctccccctgatagcagatttgatgcctactgctttaaacgtcgaatgagtgatttgagtgtaattggtcatccaatagattcagaatctaaagaagatgaaccttgtagtgaagaaacagatccagtgcatgatctaatggctgaaattttacctgaattccctgacataattgaaatagacctataccacagtgaagaaaatgaagaagaagaagaagagtgtgcaaatgctactgatgtgacaaccaccccatctgtgcagtacataaatgggaagcatctcgttaccactgtgcccaaggacccagaagctgcagaagctaggcgtggccagtttgaaagtgttgcaccttctcagaatttctcggacagctctgaaagtgatactcatccatttgtaatagccaaaacggaattgtctactgctgtgcaacctaatgaatctacagaaacaactgagtctcttgaagttacatggaagcctgagacttaccctgaaacatcagaacatttttcaggtggtgagcctgatgttttccccacagtcccattccatgaggaatttgaaagtggaacagccaaaaaaggggcagaatcagtcacagagagagatactgaagttggtcatcaggcacatgaacatactgaacctgtatctctgtttcctgaagagtcttcaggagagattgccattgaccaagaatctcagaaaatagcctttgcaagggctacagaagtaacatttggtgaagaggtagaaaaaagtacttctgtcacatacactcccactatagttccaagttctgcatcagcatatgtttcagaggaagaagcagttaccctaataggaaatccttggccagatgacctgttgtctaccaaagaaagctgggtagaagcaactcctagacaagttgtagagctctcagggagttcttcgattccaattacagaaggctctggagaagcagaagaagatgaagatacaatgttcaccatggtaactgatttatcacagagaaatactactgatacactcattactttagacactagcaggataatcacagaaagcttttttgaggttcctgcaaccaccatttatccagtttctgaacaaccttctgcaaaagtggtgcctaccaagtttgtaagtgaaacagacacttctgagtggatttccagtaccactgttgaggaaaagaaaaggaaggaggaggagggaactacaggtacggcttctacatttgaggtatattcatctacacagagatcggatcaattaattttaccctttgaattagaaagtccaaatgtagctacatctagtgattcaggtaccaggaaaagttttatgtccttgacaacaccaacacagtctgaaagggaaatgacagattctactcctgtctttacagaaacaaatacattagaaaatttgggggcacagaccactgagcacagcagtatccatcaacctggggttcaggaagggctgaccactctcccacgtagtcctgcctctgtctttatggagcagggctctggagaagctgctgccgacccagaaaccaccactgtttcttcattttcattaaacgtagagtatgcaattcaagccgaaaaggaagtagctggcactttgtctccgcatgtggaaactacattctccactgagccaacaggactggttttgagtacagtaatggacagagtagttgctgaaaatataacccaaacatccagggaaatagtgatttcagagcgattaggagaaccaaattatggggcagaaataaggggcttttccacaggttttcctttggaggaagatttcagtggtgactttagagaatactcaacagtgtctcatcccatagcaaaagaagaaacggtaatgatggaaggctctggagatgcagcatttagggacacccagacttcaccatctacagtacctacttcagttcacatcagtcacatatctgactcagaaggacccagtagcaccatggtcagcacttcagccttcccctgggaagagtttacatcctcagctgagggctcaggtgagcaactggtcacagtcagcagctctgttgttccagtgcttcccagtgctgtgcaaaagttttctggtacagcttcctccattatcgacgaaggattgggagaagtgggtactgtcaatgaaattgatagaagatccaccattttaccaacagcagaagtggaaggtacgaaagctccagtagagaaggaggaagtaaaggtcagtggcacagtttcaacaaactttccccaaactatagagccagccaaattatggtctaggcaagaagtcaaccctgtaagacaagaaattgaaagtgaaacaacatcagaggaacaaattcaagaagaaaagtcatttgaatcccctcaaaactctcctgcaacagaacaaacaatctttgattcacagacatttactgaaactgaactcaaaaccacagattattctgtactaacaacaaagaaaacttacagtgatgataaagaaatgaaggaggaagacacttctttagttaacatgtctactccagatccagatgcaaatggcttggaatcttacacaactctccctgaagctactgaaaagtcacattttttcttagctactgcattagtaactgaatctataccagctgaacatgtagtcacagattcaccaatcaaaaaggaagaaagtacaaaacattttccgaaaggcatgagaccaacaattcaagagtcagatactgagctcttattctctggactgggatcaggagaagaagttttacctactctaccaacagagtcagtgaattttactgaagtggaacaaatcaataacacattatatccccacacttctcaagtggaaagtacctcaagtgacaaaattgaagactttaacagaatggaaaatgtggcaaaagaagttggaccactcgtatctcaaacagacatctttgaaggtagtgggtcagtaaccagcacaacattaatagaaattttaagtgacactggagcagaaggacccacggtggcacctctccctttctccacggacatcggacatcctcaaaatcagactgtcaggtgggcagaagaaatccagactagtagaccacaaaccataactgaacaagactctaacaagaattcttcaacagcagaaattaacgaaacaacaacctcatctactgattttctggctagagcttatggttttgaaatggccaaagaatttgttacatcagcaccaaaaccatctgacttgtattatgaaccttctggagaaggatctggagaagtggatattgttgattcatttcacacttctgcaactactcaggcaaccagacaagaaagcagcaccacatttgtttctgatgggtccctggaaaaacatcctgaggtgccaagcgctaaagctgttactgctgatggattcccaacagtttcagtgatgctgcctcttcattcagagcagaacaaaagctcccctgatccaactagcacactgtcaaatacagtgtcatatgagaggtccacagacggtagtttccaagaccgtttcagggaattcgaggattccaccttaaaacctaacagaaaaaaacccactgaaaatattatcatagacctggacaaagaggacaaggatttaatattgacaattacagagagtaccatccttgaaattctacctgagctgacatcggataaaaatactatcatagatattgatcatactaaacctgtgtatgaagacattcttggaatgcaaacagatatagatacagaggtaccatcagaaccacatgacagtaatgatgaaagtaatgatgacagcactcaagttcaagagatctatgaggcagctgtcaacctttctttaactgaggaaacatttgagggctctgctgatgttctggctagctacactcaggcaacacatgatgaatcaatgacttatgaagatagaagccaactagatcacatgggctttcacttcacaactgggatccctgctcctagcacagaaacagaattagacgttttacttcccacggcaacatccctgccaattcctcgtaagtctgccacagttattccagagattgaaggaataaaagctgaagcaaaagccctggatgacatgtttgaatcaagcactttgtctgatggtcaagctattgcagaccaaagtgaaataataccaacattgggccaatttgaaaggactcaggaggagtatgaagacaaaaaacatgctggtccttcttttcagccagaattctcttcaggagctgaggaggcattagtagaccatactccctatctaagtattgctactacccaccttatggatcagagtgtaacagaggtgcctgatgtgatggaaggatccaatcccccatattacactgatacaacattagcagtttcaacatttgcgaagttgtcttctcagacaccatcatctcccctcactatctactcaggcagtgaagcctctggacacacagagatcccccagcccagtgctctgccaggaatagacgtcggctcatctgtaatgtccccacaggattcttttaaggaaattcatgtaaatattgaagcaactttcaaaccatcaagtgaggaataccttcacataactgagcctccctctttatctcctgacacaaaattagaaccttcagaagatgatggtaaacctgagttattagaagaaatggaagcttctcccacagaacttattgctgtggaaggaactgagattctccaagatttccaaaacaaaaccgatggtcaagtttctggagaagcaatcaagatgtttcccaccattaaaacacctgaggctggaactgttattacaactgccgatgaaattgaattagaaggtgctacacagtggccacactctacttctgcttctgccacctatggggtcgaggcaggtgtggtgccttggctaagtccacagacttctgagaggcccacgctttcttcttctccagaaataaaccctgaaactcaagcagctttaatcagagggcaggattccacgatagcagcatcagaacagcaagtggcagcgagaattcttgattccaatgatcaggcaacagtaaaccctgtggaatttaatactgaggttgcaacaccaccattttcccttctggagacttctaatgaaacagatttcctgattggcattaatgaagagtcagtggaaggcacggcaatctatttaccaggacctgatcgctgcaaaatgaacccgtgccttaacggaggcacctgttatcctactgaaacttcctacgtatgcacctgtgtgccaggatacagcggagaccagtgtgaacttgattttgatgaatgtcactctaatccctgtcgtaatggagccacttgtgttgatggttttaacacattcaggtgcctctgccttccaagttatgttggtgcactttgtgagcaagataccgagacatgtgactatggctggcacaaattccaagggcagtgctacaaatactttgcccatcgacgcacatgggatgcagctgaacgggaatgccgtctgcagggtgcccatctcacaagcatcctgtctcacgaagaacaaatgtttgttaatcgtgtgggccatgattatcagtggataggcctcaatgacaagatgtttgagcatgacttccgttggactgatggcagcacactgcaatacgagaattggagacccaaccagccagacagcttcttttctgctggagaagactgtgttgtaatcatttggcatgagaatggccagtggaatgatgttccctgcaattaccatctcacctatacgtgcaagaaaggaacagttgcttgcggccagccccctgttgtagaaaatgccaagacctttggaaagatgaaacctcgttatgaaatcaactccctgattagataccactgcaaagatggtttcattcaacgtcaccttccaactatccggtgcttaggaaatggaagatgggctatacctaaaattacctgcatgaacccatctgcataccaaaggacttattctatgaaatactttaaaaattcctcatcagcaaaggacaattcaataaatacatccaaacatgatcatcgttggagccggaggtggcaggagtcgaggcgctgatccctaaaatggcgaacatgtgttttcatcatttcagccaaagtcctaacttcctgtgcctttcctatcacctcgagaagtaattatcagttggtttggatttttggaccaccgttcagtcattttgggttgccgtgctcccaaaacattttaaatgaaagtattggcattcaaaaagacagcagacaaaatgaaagaaaatgagagcagaaagtaagcatttccagcctatctaatttctttagttttctatttgcctccagtgcagtccatttcctaatgtataccagcctactgtactatttaaaatgctcaatttcagcaccgatggccatgtaaataagatgatttaatgttgattttaatcctgtatataaaataaaaagtcacaatgagtttgggcatatttaatgatgattatggagccttagaggtctttaatcattggttcggctgcttttatgtagtttaggctggaaatggtttcacttgctctttgactgtcagcaagactgaagatggcttttcctggacagctagaaaacacaaaatcttgtaggtcattgcacctatctcagccataggtgcagtttgcttctacatgatgctaaaggctgcgaatgggatcctgatggaactaaggactccaatgtcgaactcttctttgctgcattcctttttcttcacttacaagaaaggcctgaatggaggacttttctgtaaccagg

SEQ ID NO: 1223 - DNA, 3881 bp, Homo sapiens
  Genbank Accession No. X54162
gctgaagtgttcgaccagcaggaggttttctcctcagcccactcgctgcatccagatcagctcaccccgcgccctttcctgcccaccaggactctgatagcccctggcagccacagcccattttgccaagatgtctagagtagccaaatatcgccggcagtgagtgaagaccccgacatcgacagcctgctgggaccctgtctcccgaggagatggaggagctggagaaggagctggacgtggtggacccagacgggagtgttcccgtggggctgcggcagagaaaccagacggagaaacagtccacgggtgtgtacaaccgggaggccatgctcaacttctgtgaaaaggagaccaagaaacttatgcagagggagatgtccatggatgaaagcaagcaagtggagaccaagacagatgccaagaatggacaggaaaggggcagagatgccagcaaaaaagccctgggccccagacggaactcagatctggggaaggagccaaagaggggtggtttaaagaaaagcttctctagagacagagatgaagctggtggcaagagtggcgagaagcccaaggaggagaagatcatccggggcattgacaagggccgggtcagggctgcagtggataagaaggaggcagggaaggatgggagaggagaggagagggcagtggccaccaagaaggaagaggagaagaaagggggtgacaggaacacaggcttgagcagggacaaggataaaaagagagaggagatgaaggaggtggccaagaaagaggatgatgagaaggtaaaaggggagcgtaggaacacagacaccagaaaagagggtgagaagatgaaaagagcaggtgggaacacagacatgaaaaaggaggatgagaaggtaaaaagaggaactgggaacacagacaccaaaaaggacgatgaaaaagtcaagaagaatgaacccttacatgaaaaggaagccaaggatgacagcaagaccaaaacacccgagaaacagacgcccagtggccccaccaagccctctgaaggaccggccaaggtggaggaggaggcagctcccagcatatttgatgagcctctggagagagtgaagaacaatgaccccgagatgactgaggtgaacgtcaacaactcagactgcatcacaaatgagatcttggtccggtttactgaggctctggagttcaacactgtggttaagctgttcgccttggccaacacgcgagccgatgaccacgtggcctttgccattgccatcatgctcaaggccaacaagaccatcaccagcctcaacctggactccaaccacatcacaggcaaaggcatcctggccatcttccgggccctcctccagaacaacacgctgaccgagctccgcttccacaaccagcgacacatctgtggaggcaagacggagatggagatcgccaagctgctgaaggagaatacctccctgctcaagctgggctaccattttgagctggccgggccccgaatgactgtcaccaatctgctcagccgcaacatggacaagcagagacaaaagcggctgcaggagcaaaggcaggcacaggaagccaagggagagaagaaggatctgctggaggtacccaaggccggggccgtggctaagggctccccaaaaccttcacctcaaccatctccaaagccctctccaaagaactcacccaaaaaagggggtgctccagctgccccaccaccccctccccctcccttggctccaccccttatcatggagaacctgaagaattcactctcaccagctacccagaggaagatgggagacaaagtcctccctgcccaggagaagaactcccgtgaccagctattggctgccatccgctccagcaacctcaagcagctcaagaaggtggaagtgcccaaactgcttcagtaggaccaggctgccaggcaccatctgccaatgccatgactgctcaggcctcacctcccagggctacacagaccctgcccaccccatccctggctgacctgctgtggatgtccctattctgccatgggagcgtccaggcctgggtcacgctcaaggaaggatgccttatctcttctcactttccttttcttgtctctgaggctctccaaattttgctttagtacatggagctcaggtttctggacaagaagagtccttttagcacatcactgagaagatggcactgtccagggcccatgtagctggcaagctgcaaaaggcctgtgatccaggaaagatgtcccacagggaccacatccaccccagccccactgccctccagggccaggattcaggcctctgaggagcccacggggcaaagctgctgggccagtggcactctgtgtgggaaaatggcagaaagatggagaggcatgggggcccaaaggggagcgtggggaggggctgaggataccccaaagtccaggctaattagaggatgtggcaggggcagtggcctggatgcacagtgcctgatgggagtaggctccagacaggaggagtgggacagacagcagctggacttgaaggtttgatgccaaagcagacattttcctcacacccacctgctgctgtatgaatagctgtgtatctgtttttccataagattttgataatatatacaaacctttagctgtgaatggctgtgccccacctgttgtcctgaactgtgagtcctgatcctaaccctgggctccctggaggactctagaagctcaggttccctgccacactatttgagttggccaagaaataaattcacatcctcagaaagtgcagcatggaggaaaatctgaactctaagcagaagactctccactgacctggttgtccaggtctagaaggccaggcctctactaggtctgctcctgaaccagtcctgctgcctggagtcagtagccagagttgttctcaggggtgctggggcagagtggagcccagggtgctgggatggctatattaggcatgttcagggatgctcattccatgactctgcctaaccatgggctcagggccaggtcctcacagcagtcacaggcccaggaaggcggcaggcagagaagtggagtgactatttggagaatagcacccatatctgtgtgccctagggctcagaggggcctcatcttccccagccctccccacctgctcaccaattccacttcctgccccaactgcaggaatgctgacaatgctgccatgcccaccatcgggtgtaggtgaaaggcatctttctgaatttcattctcttgaaggtgctgccaccccttggcactgtggaactgccaccttgggtctgtgtcacttgtaggtttctctgcctccaggttgcctcaacagcaggaggcacagcagtttcaccatctttgaggtgagggtggggtgccccagctaggaagcaagatcgctgtgctaggtctgaccaaaaccagagggcagtctagtcctgggggtaaagccctcagatcccagggtacactcttctccattccctccacccacttgcctgtcaccccagtcacctaagcaatcactgggcccagaggagaggagacagacacacactggctcctggacctaaagggtatgagctggagctaaggccagctagagcttccactgtcagccctcactgtcagccccactgcacccccctgtgcctgctgggcactgggcactagctagatgctttaggttgcttcagctgatccttcaactctgtgaggtggataccaatattctattttgcagatagaatttggcccagagaggttaactaatatatccatgatcacacagctaataaaagtcagagctcaggaaaaaaaaaaaaaaaaaaaaaaaaaaaaaaaa

SEQ ID NO: 1224 - DNA, 627 bp, Homo sapiens
  Genbank Accession No. X54942
agtctccggcgagttgttgcctgggctggacgtggttttgtctgctgcgcccgctcttcgcgctctcgtttcattttctgcagcgcgccacgaggatggcccacaagcagatctactactcggacaagtacttcgacgaacactacgagtaccggcatgttatgttacccagagaactttccaaacaagtacctaaaactcatctgatgtctgaagaggagtggaggagacttggtgtccaacagagtctaggctgggttcattacatgattcatgagccagaaccacatattcttctctttagacgacctcttccaaaagatcaacaaaaatgaagtttatctggggatcgtcaaatctttttcaaatttaatgtatatgtgtatataaggtagtattcagtgaatacttgagaaatgtacaaatctttcatccatacctgtgcatgagctgtattcttcacagcaacagagctcagttaaatgcaactgcaagtaggttactgtaagatgtttaagataaaagttcttccagtcagtttttctcttaagtgcctgtttgagtttactgaaacagtttacttttgttcaataaagtttgtatgttgcatttaaaaaaaaaaaaaaa

SEQ ID NO: 1225 - DNA, 7260 bp, Homo sapiens
  Genbank Accession No. X57025
tcactgtcactgctaaattcagagcagattagagcctgcgcaatggaataaagtcctcaaaattgaaatgtgacattgctctcaacatctcccatctctctggatttccttttgcttcattattcctgctaaccaattcattttcagactttgtacttcagaagcaatgggaaaaatcagcagtcttccaacccaattatttaagtgctgcttttgtgatttcttgaaggtgaagatgcacaccatgtcctcctcgcatctcttctacctggcgctgtgcctgctcaccttcaccagctctgccacggctggaccggagacgctctgcggggctgagctggtggatgctcttcagttcgtgtgtggagacaggggcttttatttcaacaagcccacagggtatggctccagcagtcggagggcgcctcagacaggcatcgtggatgagtgctgcttccggagctgtgatctaaggaggctggagatgtattgcgcacccctcaagcctgccaagtcagctcgctctgtccgtgcccagcgccacaccgacatgcccaagacccagaaggaagtacatttgaagaacgcaagtagagggagtgcaggaaacaagaactacaggatgtaggaagaccctcctgaggagtgaagagtgacatgccaccgcaggatcctttgctctgcacgagttacctgttaaactttggaacacctaccaaaaaataagtttgataacatttaaaagatgggcgtttcccccaatgaaatacacaagtaaacattccaacattgtctttaggagtgatttgcaccttgcaaaaatggtcctggagttggtagattgctgttgatcttttatcaataatgttctatagaaaagaaaaaaaaatatatatatatatatatcttagtccctgcctctcaagagccacaaatgcatgggtgttgtatagatccagttgcactaaattcctctctgaatcttggctgctggagccattcattcagcaaccttgtctaagtggtttatgaattgtttccttatttgcacttctttctacacaactcgggctgtttgttttacagtgtctgataatcttgttagtctatacccaccacctcccttcataacctttatatttgccgaatttggcctcctcaaaagcagcagcaagtcgtcaagaagcacaccaattctaacccacaagattccatctgtggcatttgtaccaaatataagttggatgcattttattttagacacaaagctttatttttccacatcatgcttacaaaaaagaataatgcaaatagttgcaactttgaggccaatcatttttaggcatatgttttaaacatagaaagtttcttcaactcaaaagagttccttcaaatgatgagttaatgtgcaacctaattagtaactttcctctttttattttttccatatagagcactatgtaaatttagcatatcaattatacaggatatatcaaacagtatgtaaaactctgttttttagtataatggtgctattttgtagtttgttatatgaaagagtctggccaaaacggtaatacgtgaaagcaaaacaataggggaagcctggagccaaagatgacacaaggggaagggtactgaaaacaccatccatttgggaaagaaggcaaagtccccccagttatgccttccaagaggaacttcagacacaaaagtccactgatgcaaattggactggcgagtccagagaggaaactgtggaatggaaaaagcagaaggctaggaattttagcagtcctggtttctttttctcatggaagaaatgaacatctgccagctgtgtcatggactcaccactgtgtgaccttgggcaagtcacttcacctctctgtgcctcagtttcctcatctgcaaaatgggggcaatatgtcatctacctacctcaaaggggtggtataaggtttaaaaagataaagattcagatttttttaccctgggttgctgtaagggtgcaacatcagggcgcttgagttgctgagatgcaaggaattctataaataacccattcatagcatagctagagattggtgaattgaatgctcctgacatctcagttcttgtcagtgaagctatccaaataactggccaactagttgttaaaagctaacagctcaatctcttaaaacacttttcaaaatatgtgggaagcatttgattttcaatttgattttgaattctgcatttggttttatgaatacaaagataagtgaaaagagagaaaggaaaagaaaaaggagaaaaacaaagagatttctaccagtgaaaggggaattaattactctttgttagcactcactgactcttctatgcagttactacatatctagtaaaaccttgtttaatactataaataatattctattcattttgaaaaacacaatgattccttcttttctaggcaatataaggaaagtgatccaaaatttgaaatattaaaataatatctaataaaaagtcacaaagttatcttctttaacaaactttactcttattcttagctgtatatacatttttttaaaaagtttgttaaaatatgcttgactagagtttcagttgaaaggcaaaaacttccatcacaacaagaaatttcccatgcctgctcagaagggtagcccctagctctctgtgaatgtgttttatccattcaactgaaaattggtatcaagaaagtccactggttagtgtactagtccatcatagcctagaaaatgatccctatctgcagatcaagattttctcattagaacaatgaattatccagcattcagatctttctagtcaccttagaactttttggttaaaagtacccaggcttgattatttcatgcaaattctatattttacattcttggaaagtctatatgaaaaacaaaaataacatcttcagtttttctcccactgggtcacctcaaggatcagaggccaggaaaaaaaaaaaagactccctggatctctgaatatatgcaaaaagaaggccccatttagtggagccagcaatcctgttcagtcaacaagtattttaactctcagtccaacattatttgaattgagcacctcaagcatgcttagcaatgttctaatcactatggacagatgtaaaagaaactatacatcatttttgccctctgcctgttttccagacatacaggttctgtggaataagatactggactcctcttcccaagatggcacttctttttatttcttgtccccagtgtgtaccttttaaaattattccctctcaacaaaactttataggcagtcttctgcagacttaacatgttttctgtcatagttagatgtgataattctaagagtgtctatgacttatttccttcacttaattctatccacagtcaaaaatcccccaaggaggaaagctgaaagatgcaactgccaatattatctttcttaactttttccaacacataatcctctccaactggattataaataaattgaaaataactcattataccaattcactattttattttttaatgaattaaaactagaaaacaaattgatgcaaaccctggaagtcagttgattactatatactacagcagaatgactcagatttcatagaaaggagcaaccaaaatgtcacaaccaaaactttacaagctttgcttcagaattagattgctttataattcttgaatgaggcaatttcaagatatttgtaaaagaacagtaaacattggtaagaatgagctttcaactcataggcttatttccaatttaattgaccatactggatacttaggtcaaatttctgttctctcttgcccaaataatattaaagtattatttgaactttttaagatgaggcagttcccctgaaaaagttaatgcagctctccatcagaatccactcttctagggatatgaaaatctcttaacacccaccctacatacacagacacacacacacacacacacacacacacacacacacacacattcaccctaaggatccaatggaatactgaaaagaaatcacttccttgaaaattttattaaaaaacaaacaaacaaacaaaaagcctgtccacccttgagaatccttcctctccttggaacgtcaatgtttgtgtagatgaaaccatctcatgctctgtggctccagggtttctgttactattttatgcacttgggagaaggcttagaataaaagatgtagcacattttgctttcccatttattgtttggccagctatgccaatgtggtgctattgtttctttaagaaagtacttgactaaaaaaaaaagaaaaaaagaaaaaaaagaaagcatagacatatttttttaaagtataaaaacaacaattctatagatagatggcttaataaaatagcattaggtctatctagccaccaccacctttcaactttttatcactcacaagtagtgtactgttcaccaaattgtgaatttgggggtgcaggggcaggagttggaaattttttaaagttagaaggctccattgttttgttggctctcaaacttagcaaaattagcaatatattatccaatcttctgaacttgatcaagagcatggagaataaacgcgggaaaaaagatcttataggcaaatagaagaatttaaaagataagtaagttccttattgatttttgtgcactctgctctaaaacagatattcagcaagtggagaaaataagaacaaagagaaaaaatacatagatttacctgcaaaaaatagcttctgccaaatcccccttgggtattctttggcatttactggtttatagaagacattctcccttcacccagacatctcaaagagcagtagctctcatgaaaagcaatcactgatctcatttgggaaatgttggaaagtatttccttatgagatgggggttatctactgataaagaaagaatttatgagaaattgttgaaagagatggctaacaatctgtgaagattttttgtttcttggttttgtttttttttttttttttactttatacagtctttatgaatttcttaatgttcaaaatgacttggttcttttcttcttttttttatatcagaatgaggaataataagttaaacccacatagactctttaaaactataggctagatagaaatgtatgtttgacttgttgaagctataatcagactatttaaaatgttttgctatttttaatcttaaaagattgtgctaatttattagagcagaacctgtttggctctcctcagaagaaagaatctttccattcaaatcacatggctttccaccaatattttcaaaagataaatctgatttatgcaatggcatcatttattttaaaacagaagaattgtgaaagtttatgcccctcccttgcaaagaccataaagtccagatctggtaggggggcaacaacaaaaggaaaatgttgttgattcttggttttggattttgttttgttttcaatgctagtgtttaatcctgtagtacatatttgcttattgctattttaatattttataagaccttcctgttaggtattagaaagtgatacatagatatcttttttgtgtaatttctatttaaaaaagagagaagactgtcagaagctttaagtgcatatggtacaggataaagatatcaatttaaataaccaattcctatctggaacaatgcttttgttttttaaagaaacctctcacagataagacagaggcccaggggatttttgaagctgtctttattctgcccccatcccaacccagcccttattattttagtatctgcctcagaattttatagagggctgaccaagctgaaactctagaattaaaggaacctcactgaaaacatatatttcacgtgttccctctcttttttttcctttttgtgagatggggtctcgcactgtcccccaggctggagtgcagtggcatgatctcggctcactgcaacctccacctcctgggtttaagcgattctcctgcctcagcctcctgagtagctgggattacaggcacccaccactatgcccggctaattttttggatttttaatagagacggggttttaccatgttggccaggttggactcaaactcctgaccttgtgatttgcccgcctcagcctcccaaattgctgggattacaggcatgagccaccacaccctgcccatgtgttccctcttaatgtatgattacatggatcttaaacatgatccttctctcctcattcttcaactatctttgatggggtctttcaaggggaaaaaaatccaagcttttttaaagtaaaaaaaaaaaaagagaggacacaaaaccaaatgttactgctcaactgaaatatgagttaagatggagacagagtttctcctaataaccggagctgaattacctttcactttcaaaaacatgaccttccacaatccttagaatctgcctttttttatattactgaggcctaaaagtaaacattactcattttattttgcccaaaatgcactgatgtaaagtaggaaaaataaaaacagagctctaaaatccctttcaagccacccattgaccccactcaccaactcatagcaaagtcacttctgttaatcccttaatctgattttgtttggatatttatcttgtacccgctgctaaacacactgcaggagggactctgaaacctcaagctgtctacttacatcttttatctgtgtctgtgtatcatgaaaatgtctattcaaaatatcaaaacctttcaaatatcacgcagcttatattcagtttacataaaggccccaaataccatgtcagatctttttggtaaaagagttaatgaactatgagaattgggattacatcatgtattttgcctcatgtatttttatcacacttataggccaagtgtgataaataaacttacagacactgaattaatttcccctgctactttgaaaccagaaaataatgactggccattcgttacatctgtcttagttgaaaagcatattttttattaaattaattctgattgtatttgaaattattattcaattcacttatggcagaggaatatcaatcctaatgacttctaaaaatgtaactaattgaatcattatcttacatttactgtttaataagcatattttgaaaatgtatggctagagtgtcataataaaatggtatatctttctttagtaattacaaaaaaaaaaaaaaaaaaaaaaaa

SEQ ID NO: 1226 - DNA, 2247 bp, Homo sapiens
  Genbank Accession No. X57766
ccggggcggatggctccggccgcctggctccgcagcgcggccgcgcgcgccctcctgcccccgatgctgctgctgctgctccagccgccgccgctgctggcccgggctctgccgccggacgtccaccacctccatgccgagaggagggggccacagccctggcatgcagccctgcccagtagcccggcacctgcccctgccacgcaggaagccccccggcctgccagcagcctcaggcctccccgctgtggcgtgcccgacccatctgatgggctgagtgcccgcaaccgacagaagaggttcgtgctttctggcgggcgctgggagaagacggacctcacctacaggatccttcggttcccatggcagttggtgcaggagcaggtgcggcagacgatggcagaggccctaaaggtatggagcgatgtgacgccactcacctttactgaggtgcacgagggccgtgctgacatcatgatcgacttcgccaggtactggcatggggacgacctgccgtttgatgggcctgggggcatcctggcccatgccttcttccccaagactcaccgagaaggggatgtccacttcgactatgatgagacctggactatcggggatgaccagggcacagacctgctgcaggtggcagcccatgaatttggccacgtgctggggctgcagcacacaacagcagccaaggccctgatgtccgccttctacacctttcgctacccactgagtctcagcccagatgactgcaggggcgttcaacacctatatggccagccctggcccactgtcacctccaggaccccagccctgggcccccaggctgggatagacaccaatgagattgcaccgctggagccagacgccccgccagatgcctgtgaggcctcctttgacgcggtctccaccatccgaggcgagctctttttcttcaaagcgggctttgtgtggcgcctccgtgggggccagctgcagcccggctacccagcattggcctctcgccactggcagggactgcccagccctgtggacgctgccttcgaggatgcccagggccacatttggttcttccaaggtgctcagtactgggtgtacgacggtgaaaagccagtcctgggccccgcacccctcaccgagctgggcctggtgaggttcccggtccatgctgccttggtctggggtcccgagaagaacaagatctacttcttccgaggcagggactactggcgtttccaccccagcacccggcgtgtagacagtcccgtgccccgcagggccactgactggagaggggtgccctctgagatcgacgctgccttccaggatgctgatggctatgcctacttcctgcgcggccgcctctactggaagtttgaccctgtgaaggtgaaggctctggaaggcttcccccgtctcgtgggtcctgacttctttggctgtgccgagcctgccaacactttcctctgaccatggcttggatgccctcaggggtgctgacccctgccaggccacgaatatcaggctagagacccatggccatctttgtggctgtgggcaccaggcatgggactgagcccatgtctcctgcagggggatggggtggggtacaaccaccatgacaactgccgggagggccacgcaggtcgtggtcacctgccagcgactgtctcagactgggcagggaggctttggcatgacttaagaggaagggcagtcttgggacccgctatgcaggtcctggcaaacctggctgccctgtctcatccctgtccctcagggtagcaccatggcaggactgggggaactggagtgtccttgctgtatccctgttgtgaggttccttccaggggctggcactgaagcaagggtgctggggccccatggccttcagccctggctgagcaactgggctgtagggcagggccacttcctgaggtcaggtcttggtaggtgcctgcatctgtctgccttctggctgacaatcctggaaatctgttctccagaatccaggccaaaaagttcacagtcaaatggggaggggtattcttcatgcaggagaccccaggccctggaggctgcaacatacctcaatcctgtcccaggccggatcctcctgaagcccttttcgcagcactgctatcctccaaagccattgtaaatgtgtgtacagtgtgtataaaccttcttcttcttttttttttttaaactgaggattgtcattaaacacagttgttttct

SEQ ID NO: 1227 - DNA, 3226 bp, Homo sapiens
  Genbank Accession No. X60382
aatccatctgagaatatgctgccacaaataccctttttgctgctagtatccttgaacttggttcatggagtgttttacgctgaacgataccaaacgcccacaggcataaaaggcccactacccaacaccaagacacagttcttcattccctacaccataaagagtaaaggtatagcagtaagaggagagcaaggtactcctggtccaccaggccctgctggacctcgagggcacccaggtccttctggaccaccaggaaaaccaggctacggaagtcctggactccaaggagagccagggttgccaggaccaccgggaccatcagctgtagggaaaccaggtgtgccaggactcccaggaaaaccaggagagagaggaccatatggaccaaaaggagatgttggaccagctggcctaccaggaccccggggcccaccaggaccacctggaatccctggaccggctggaatttctgtgccaggaaaacctggacaacagggacccacaggagccccaggacccaggggctttcctggagaaaagggtgcaccaggagtccctggtatgaatggacagaaaggggaaatgggatatggtgctcctggtcgtccaggtgagaggggtcttccaggccctcagggtcccacaggaccatctggccctcctggagtgggaaaaagaggtgaaaatggggttccaggacagccaggcatcaaaggtgatagaggttttccgggagaaatgggaccaattggcccaccaggtccccaaggccctcctggggaacgagggccagaaggcattggaaagccaggagctgctggagccccaggccagccagggattccaggaacaaaaggtctccctggggctccaggaatagctgggcccccagggcctcctggctttgggaaaccaggcttgccaggcctgaagggagaaagaggacctgctggccttcctgggggtccaggtgccaaaggggaacaagggccagcaggtcttcctgggaagccaggtctgactggaccccctgggaatatgggaccccaaggaccaaaaggcatcccgggtagccatggtctcccaggccctaaaggtgagacagggccagctgggcctgcaggataccctggggctaagggtgaaaggggttcccctgggtcagatggaaaaccagggtacccaggaaaaccaggtctcgatggtcctaagggtaacccagggttaccaggtccaaaaggtgatcctggagttggaggacctcctggtctcccaggccctgtgggcccagcaggagcaaagggaatgcccggacacaatggagaggctggcccaagaggtgcccctggaataccaggtactagaggccctattgggccaccaggcattccaggattccctgggtctaaaggggatccaggaagtcccggtcctcctggcccagctggcatagcaactaagggcctcaatggacccaccgggccaccagggcctccaggtccaagaggcccctctggagagcctggtcttccagggccccctgggcctccaggcccaccaggtcaagcagtcatgcctgagggttttataaaggcaggccaaaggcccagtctttctgggacccctcttgttagtgccaaccagggggtaacaggaatgcctgtgtctgcttttactgttattctctccaaagcttacccagcaataggaactcccataccatttgataaaattttgtataacaggcaacagcattatgacccaaggactggaatctttacttgtcagataccaggaatatactatttttcataccacgtgcatgtgaaagggactcatgtttgggtaggcctgtataagaatggcacccctgtaatgtacacctatgatgaatacaccaaaggctacctggatcaggcttcagggagtgccatcatcgatctcacagaaaatgaccaggtgtggctccagcttcccaatgccgagtcaaatggcctatactcctctgagtatgtccactcctctttctcaggattcctagtggctccaatgtgagtacaccccacagagctaatctaaatcttgtgctagaaaaagcattctctaactctaccccaccctacaaaatgcatatggaggtaggctgaaaagaatgtaatttttattttctgaaatacagatttgagctatcagaccaacaaaccttccccctgaaaagtgagcagcaacgtaaaaacgtatgtgaagcctctcttgaatttctagttagcaatcttaaggctctttaaggttttctccaatattaaaaaatatcaccaaagaagtcctgctatgttaaaaacaaacaacaaaaaacaaagcaacaaaaaaaaaaattaaaaaaaaaaacagaaatagagctctaagttatgtgaaatttgatttgagaaactcggcatttcctttttaaaaaagcctgtttctaactatgaatatgagaacttctaggaaacatccaggaggtatcatataactttgtagaacttaaatacttgaatattcaaatttaaaagacactgtatcccctaaaatatttctgatggtgcactactctgaggcctgtatggcccctttcatcaatatctattcaaatatacaggtgcatatatacttgttaaagctcttatataaaaaagccccaaaatattgaagttcatctgaaatgcaaggtgctttcatcaatgaaccttttcaaaacttttctatgattgcagagaagctttttatatacccagcataacttggaaacaggtatctgacctattcttatttagttaacacaagtgtgattaatttgatttctttaattccttattgaatcttatgtgatatgattttctggatttacagaacattagcacatgtaccttgtgcctcccattcaagtgaagttataatttacactgagggtttcaaaattcgactagaagtggagatatattatttatttatgcactgtactgtatttttatattgctgtttaaaacttttaagctgtgcctcacttattaaagcacaaaatgttttacctactccttatttacgacacaataaaataacatcaatagatttttaggctgaattaatttgaaagcagcaatttgctgttctcaaccattctttcaaggcttttcattcgacacaataaaataacatcaatagatttttagggatgggtggcttt

SEQ ID NO: 1228 - DNA, 4272 bp, Homo sapiens
  Genbank Accession No. X63741
atactgaggccgcgtccgacccccttgagccgagatccccccccagcccagcccccaccccaccccccgcacacgccccaccccccccacgacccagcctcataccgcaccagctgaggcacccaagaggattaccccctggggccctctcccgccccccaaaaaagagaagatcccctctcctggcccatcccttcccttcttccctcccccctccccccgaactttccctctcgcatgcttttcccctgcaccacggatcgcctctcggatgccgcttgcctggaagctgcgttaggagcgagcggcggcggtggcggcggtggcggcggcggcggcagctcgggagtgctatgaccggcaaactcgccgagaagctgccggtgaccatgagcagtttgctaaaccaactgcctgacaatctgtaccccgaggagatccccagcgcgctcaacctcttctccggcagcagcgactcggtagtccattacaatcagatggctacagagaatgtaatggacatcggtctgaccaacgagaagcccaacccggaactctcttactccggctccttccagccagcccccggcaacaagaccgtgacctacttgggaaagttcgccttcgactccccttccaactggtgccaggacaacatcattagcctcatgagcgccggcatcttgggggtgcccccggcttcaggggcgctcagcacgcagacgtccacggccagcatggtgcagccaccgcagggtgacgtggaggccatgtatcccgcgctacccccctactccaactgcggcgacctctactcagagcccgtgtctttccacgacccccagggcaatcccgggctcgcctattccccccaggattaccaatcggccaagccggcgttggacagcaatctcttccccatgattcctgactacaacctctaccaccaccccaacgacatgggctccattccggagcacaagcccttccagggcatggaccccatccgggtcaacccgccccctattacccctctggagaccatcaaggcattcaaagacaagcagatccacccgggctttggcagcctgccccagccgccgctcaccctcaagcccatccggccccgcaagtaccccaaccggcctagcaagacaccgctccacgaacggccccacgcgtgcccggccgagggctgcgaccgccgtttcagccgttcggacgagctgacccggcacctgcgcatccacacgggccacaagcccttccagtgccggatctgcatgcggagcttcagccgcagcgaccacctcaccactcacatccgcactcatacgggcgagaagccctttgcctgcgagttctgcgggcgcaagtttgcgcgcagcgacgagcgcaagcgccacgccaagatccacctcaagcaaaaggagaagaaggcggagaagggcggtgcaccctctgcatcctcggcgccccccgtgtcgctggcccccgtggtcaccacctgcgcctgaggatcgggcccccagatccccacttttcccctccagtgcctcccggctgctagcctgaaagcagcgggaaagccagccacggaggcgtaggggccgcgccctggcctctccatggacgtgcggccccttgcttccccttcgatgcccccggttcccaacctttcacgccggccagcggtcaggggccagggctggaggcgccttcccctcgcggtcccccacttagccaaggcgtgggggcggaaaggtggcgtctagcccgctttgttcagttcggatcgccttgatccaggggccgccgggccgcgccaaggacctgcaagggactgaaggcggagcccatccaaccctcgcccgacccaaacacctcattgtttcccccacgtctccctctataccccctcgaagactcgagagggggagggggtaaggagcgcaccaaagcgcagagcttgctgcccgccgcacgcacgcgcgcctgcgtgcggggatgcgcgcgagtgtgtgcgtgctcgcgtgtgtgtgtatgtgtgtgtgtgagtgtgtgtgtgtgcgcgcgcgcaagcgtgtgtgtttaagactcttgagctgaactgggctgtgtttaccccaaactcttccccacctcgggtccccaagccgctgggagatgtcccatgctgggggtccgcacgtggctggaggaggtggtcttccatccgctctgaaatcatgtttcttagagaaatgcctcggatgccgccgacgcggtgctgctgccgccgcttcgggtttggcccctcagaacccctccttttctgagcgcttccctcttaggcctcagggcagtttgatctgtggggagaaagagcagccatcgctgagcctgccttttaaaatatatgtgtatttccttagccccactctaagaaatctatgttcctgagtttgccctctgccctcccactccttccccttctcccctctaaaccttctcccatctctttcaaaatcttttcccagaaaggcaggcttcaaccagccactccagctttgtgtcttctctcaattacatagcaatttctccttcccaccatcatggggaagctggctctgcttttgccctttgtcatcaccaacacaacagatagaatttaaatataagtatatggtgtgcgtgtgtgtgtgtgtgtatgtatatgcatgcatgtgtataaagatgcacatgcgtacatatacataacatacacacaatatgtattcctagcaaaataaaatctctaaggtacttggttatccagtgcagtgcaccggaataaagagaatttgtaggcgtatacagctttaaatgatttattttttatgaaaatgttaactgatgagattatatctacatacgtgtgttatgtgtgtggatatagatgcacacatatctgtacatatacatgtgagtgtacatatatacacatatacacatctatgtatggatatgtgtgtatacacatatacacatctctgtccaaaatttcctcaaagatatggggattttttcatgaatccatgtggatgaatgaggtgtctcctttccatacccagtctcaccttctccccaccctacctcacctcttctcaggcacccctcttccccagctgtcctgccagcccttctcgtacagggtggctcctttgaagtggagtaatagggaaggttgctctctgccacagcttgcagcatggtcttgactgaatgtactgttcctgttagcgttacttctcctgtggtcagtaagttgcccagagagaaggaacaaagtctggagtttacagaatgtctgtttttaaagtcactttatgcgttttccacttttttcttttttaagaaaaagaagtaccatttttgttttgttttgttttgatttttggtggtggataaataatactaaaaggactctagtggaaaggggggatatcgaagagcagggggttgtgaatttccaggtacttggactttttgtagaaggagagagaagaagatgaagtttgccaggagggcccatattttttcagctgaagggtaaaatctttctttgcagagacagtattttgctgaatactttttataatgtgatgattattaaaaaagcaaaaattttggtcacttccaagctagaaggaggaatcagataccctttaatattttttcctcgctccttctggtatatgcatgtcactgcatgataattgagttttcctttgttttaataaaactgttctcagacattaagctaaactaagagaaaaataactttgttgccaaaaggttgtgctatccagattttttatatgtctgcatgtttaaaaaaaaaaagcaacaaaagaaaatgcactctaacttatgtgaactgagagaaaaaaatcaggttttaaacaggaaaacctatggggaatgatattttttgaaagacttttgtataaagttgagtacttagaaaaaagacaaaccagatgtaatatattttgtggatgtttttatttcttggatttatagtaccttatactaaggttaaaaaaatatgcttgatattgtgaaaaggtgaaattcttcaccaacatttcatttgctcctttgtcatattgtaatgccaatataatatagttaatgaaaacagcatttttaaaaaccgaaatattgaaatggtgtaatgttgtaccatttgcactgtgagcaaatgctaatacagtaaatatattgtgtttgctgacaatcaaaaaaaaa

SEQ ID NO: 1229 - DNA, 874 bp, Homo sapiens
  Genbank Accession No. X64559
gggcgggaagacgtgcagcctgggccgtggctgctcactgcgttcggacccagacccgctgcaggcagcagcagcccccgcccgcgcacgagcatggagctctggggggcctacctcctcctctgcctcttctccctcctgacccaggtcaccaccgagccaccaacccagaagcccaagaagattgtaaatgccaagaaagatgttgtgaacacaaagatgtttgaggagctcaagagccgtctggacaccctggcccaggaggtggccctgctgaaggagcagcaggccctgcagacggtctgcctgaaggggaccaaggtgcacatgaaatgctttctggccttcacccagacgaagaccttccacgaggccagcgaggactgcatctcgcgcgggggcaccctgagcacccctcagactggctcggagaacgacgccctgtatgagtacctgcgccagagcgtgggcaacgaggccgagatctggctgggcctcaacgacatggcggccgagggcacctgggtggacatgaccggcgcccgcatcgcctacaagaactgggagactgagatcaccgcgcaacccgatggcggcaagaccgagaactgcgcggtcctgtcaggcgcggccaacggcaagtggttcgacaagcgctgccgcgatcagctgccctacatctgccagttcgggatcgtgtagccggcggggcgggggccgtggggggcctggaggagggcaggagccgcgggaggccgggaggagggtggggaccttgcagcccccatcctctccgtgcgcttggagcctctttttgcaaataaagttggtgcacgttcgcggagaggaaaaaaaaaaaaaaaaaaaaaaaaaa

SEQ ID NO: 1230 - DNA, 1817 bp, Homo sapiens
  Genbank Accession No. X67098
gccacggcgcggacgccatgcacacggaccctgactactcggctgcctatgtcgtcatagaaactgatgcagaagatggaatcaaggggtgtggaattaccttcactctgggaaaaggcactgaagttgattggtccagaaaagggcgtggtgcacctggcgacagcggccgtcctaaacgcggtgtgggacttgtgggccaagcaggagggaaagcctgtctggaagttacttgtggacatggatcccaggatgctggtatcctgcatagatttcaggtacatcactgatgtcctgactgaggaggatgccctagaaatactgcagaaaggtcaaattggtaaaaaagaaagagagaagcaaatgctggcacaaggataccctgcttacacgacatcgtgcgcctggctggggtactcagatgacacgttgaagcagctctgtgcccaggcgctgaaggatggctggaccaggtttaaagtaaaggtgggtgctgatctccaggatgacatgcgaagatgccaaatcatccgagacatgattggaccggaaaagactttgatgatggatgccaaccagcgctgggatgtgcctgaggcggtggagtggatgtccaagctggccaagttcaagccattgtggattgaggagccaacctcccctgatgacattctggggcacgccaccatttccaaggcactggtcccattaggaattggcattgccacaggagaacagtgccacaatagagtgatatttaagcaactcctacaggcgaaggccctgcagttcctccagattgacagttgcagactgggcagtgtcaatgagaacctctcagtattgctgatggccaaaaagtttgaaattcctgtttgcccccatgctggtggagttggcctctgtgaactggtgcagcacctgattatatttgactacatatcagtttctgcaagccttgaaaatagggtgtgtgagtatgttgaccacctgcatgagcatttcaagtatcccgtgatgatccagcgggcttcctacatgcctcccaaggatcccggctactcaacagaaatgaaggaggaatctgtaaagaaacaccagtatccagatggtgaagtttggaagaaactccttcctgctcaagaaaattaagtgctcagccccaacaacttttttctttctgaagtgaaagggcttaaaatttcttggaaatagttttacaaaaatggatttaaaaaatcctaccgatcaagatgagttcagctagaagtcataccaccctcaggaatcagctaaagcaaaaagaacttttacctcggcatccagcccaacccctaaagactgacaatatccttcaagctcctttgaaagcaccctaaacagccatttccattttaatagttggatgcggattgtacccttcaatctgaaagtcttcagctttgaagtcatcaattttctcaacttttcgaagaatcctgagctttgggaaaggtctgggttctcgctgaagctaaaaacaaaataaggccattattttgccataattgtacgacctgttgtaattgctcctcatgtccatgaaacaagtacacaggatgtgatcaacaaagttctattttacaggagtatgatcctgtcgataccttgccgtagttatgtaacatgattggagcgcaaccagctgttctcttgaccacagatcgagagtgaggggtattttgtgacattacacagcatcaggagcctggtgcctcatcaggtgtaagttcttataaccactcttggcaaatttattaaagacaggaacacagtca

SEQ ID NO: 1231 - DNA, 597 bp, Homo sapiens
  Genbank Accession No. X67325
agctgaagttgaggatctcttactctctaagccacggaattaacccgagcaggcatggaggcctctgctctcacctcatcagcagtgaccagtgtggccaaagtggtcagggtggcctctggctctgccgtagttttgcccctggccaggattgctacagttgtgattggaggagttgtggccatggcggctgtgcccatggtgctcagtgccatgggcttcactgcggcgggaatcgcctcgtcctccatagcagccaagatgatgtccgcggcggccattgccaatgggggtggagttgcctcgggcagccttgtgggtactctgcagtcactgggagcaactggactctccggattgaccaagttcatcctgggctccattgggtctgccattgcggctgtcattgcgaggttctactagctccctgcccctcgccctgcagagaagagaaccatgccaggggagaaggcacccagccatcctgacccagcgaggagccaactatcccaaatatacctgggtgaaatataccaaattctgcatctccagaggaaaataagaaataaagatgaattgttgcaactcttaaaaaaa

SEQ ID NO: 1232 - DNA, 2000 bp, Homo sapiens
  Genbank Accession No. X68277
tttgggctgtgtgtgcgacgcgggtcggaggggcagtcgggggaaccgcgaagaagccgaggagcccggagccccgcgtgacgctcctctctcagtccaaaagcggcttttggttcggcgcagagagacccgggggtctagcttttcctcgaaaagcgccgccctgcccttggccccgagaacagacaaagagcaccgcagggccgatcacgctgggggcgctgaggccggccatggtcatggaagtgggcaccctggacgctggaggcctgcgggcgctgctgggggagcgagcggcgcaatgcctgctgctggactgccgctccttcttcgctttcaacgccggccacatcgccggctctgtcaacgtgcgcttcagcaccatcgtgcggcgccgggccaagggcgccatgggcctggagcacatcgtgcccaacgccgagctccgcggccgcctgctggccggcgcctaccacgccgtggtgttgctggacgagcgcagcgccgccctggacggcgccaagcgcgacggcaccctggccctggcggccggcgcgctctgccgcgaggcgcgcgccgcgcaagtcttcttcctcaaaggaggatacgaagcgttttcggcttcctgcccggagctgtgcagcaaacagtcgacccccatggggctcagccttcccctgagtactagcgtccctgacagcgcggaatctgggtgcagttcctgcagtaccccactctacgatcagggtggcccggtggaaatcctgccctttctgtacctgggcagtgcgtatcacgcttcccgcaaggacatgctggatgccttgggcataactgccttgatcaacgtctcagccaattgtcccaaccattttgagggtcactaccagtacaagagcatccctgtggaggacaaccacaaggcagacatcagctcctggttcaacgaggccattgacttcatagactccatcaagaatgctggaggaagggtgtttgtccactgccaggcaggcatttcccggtcagccaccatctgccttgcttaccttatgaggactaatcgagtcaagctggacgaggcctttgagtttgtgaagcagaggcgaagcatcatctctcccaacttcagcttcatgggccagctgctgcagtttgagtcccaggtgctggctccgcactgttcggcagaggctgggagccccgccatggctgtgctcgaccgaggcacctccaccaccaccgtgttcaacttccccgtctccatccctgtccactccacgaacagtgcgctgagctaccttcagagccccattacgacctctcccagctgctgaaaggccacgggaggtgaggctcttcacatcccattgggactccatgctccttgagaggagaaatgcaataactctgggaggggctcgagagggctggtccttatttatttaacttcacccgagttcctctgggtttctaagcagttatggtgatgacttagcgtcaagacatttgctgaactcagcacattcgggaccaatatatagtgggtacatcaagtccatctgacaaaatggggcagaagagaaaggactcagtgtgtgatccggtttctttttgctcgcccctgttttttgtagaatctcttcatgcttgacatacctaccagtattattcccgacgacacatatacatatgagaatataccttatttatttttgtgtaggtgtctgccttcacaaatgtcattgtctactcctagaagaaccaaatacctcaatttttgtttttgagtactgtactatcctgtaaatatatcttaagcaggtttgttttcagcactgatggaaaataccagtgttgggtttttttttagttgccaacagttgtatgtttgctgattatttatgacctgaaataatatatttcttcttctaagaagacattttgttacataaggatgacttttttatacaatggaataaattatggcatttctattg

SEQ ID NO: 1233 - DNA, 1755 bp, Homo sapiens
  Genbank Accession No. X70940
cctcggctccggaatcactgcagcccccctcgccctgagccagagcaccccgggtcccgccagcccctcacactcccagcaaaatgggcaaggagaagacccacatcaacatcgtggtcatcggccacgtggactccggaaagtccaccaccacgggccacctcatctacaaatgcggaggtattgacaaaaggaccattgagaagttcgagaaggaggcggctgagatggggaagggatccttcaagtatgcctgggtgctggacaagctgaaggcggagcgtgagcgcggcatcaccatcgacatctccctctggaagttcgagaccaccaagtactacatcaccatcatcgatgcccccggccaccgcgacttcatcaagaacatgatcacgggtacatcccaggcggactgcgcagtgctgatcgtggcggcgggcgtgggcgagttcgaggcgggcatctccaagaatgggcagacgcgggagcatgccctgctggcctacacgctgggtgtgaagcagctcatcgtgggcgtgaacaaaatggactccacagagccggcctacagcgagaagcgctacgacgagatcgtcaaggaagtcagcgcctacatcaagaagatcggctacaacccggccaccgtgccctttgtgcccatctccggctggcacggcgacaacatgctggagccctcccccaacatgccgtggttcaagggctggaaggtggagcgtaaggagggcaacgcaagcggcgtgtccctgctggaggccctggacaccatcctgccccccacgcgccccacggacaagcccctgcgcctgccgctgcaggacgtgtacaagattggcggcattggcacggtgcccgtgggccgggtggagaccggcatcctgcggccgggcatggtggtgacctttgcgccagtgaacatcaccactgaggtgaagtcagtggagatgcaccacgaggctctgagcgaagctctgcccggcgacaacgtcggcttcaatgtgaagaacgtgtcggtgaaggacatccggcggggcaacgtgtgtggggacagcaagtctgacccgccgcaggaggctgctcagttcacctcccaggtcatcatcctgaaccacccggggcagattagcgccggctactccccggtcatcgactgccacacagcccacatcgcctgcaagtttgcggagctgaaggagaagattgaccggcgctctggcaagaagctggaggacaaccccaagtccctgaagtctggagacgcggccatcgtggagatggtgccgggaaagcccatgtgtgtggagagcttctcccagtacccgcctctcggccgcttcgccgtgcgcgacatgaggcagacggtggccgtaggcgtcatcaagaacgtggaaaagaagagcggcggcgccggcaaggtcaccaagtcggcgcagaaggcgcagaaggcgggcaagtgaagcgcgggccgcggcgcgaccctccccggcggcgccgcgctccgaaccccggcccggcccccgccccgcccccgccccgcgcgccgctccggcgccccgcacccccgccaggcgcatgtctgcacctccgcttgccagaggccctcggtcagcgactggatgctcgccatcaaggtccagtggaagttcttcaagaggaaaggcgcccccgccccaggcttccgcgcccagcgctcgccacgctcagtgcccgttttaccaataaactgagcgaccccag

SEQ ID NO: 1234 - DNA, 2545 bp, Homo sapiens
  Genbank Accession No. X72755
atccaatacaggagtgacttggaactccattctatcactatgaagaaaagtggtgttcttttcctcttgggcatcatcttgctggttctgattggagtgcaaggaaccccagtagtgagaaagggtcgctgttcctgcatcagcaccaaccaagggactatccacctacaatccttgaaagaccttaaacaatttgccccaagcccttcctgcgagaaaattgaaatcattgctacactgaagaatggagttcaaacatgtctaaacccagattcagcagatgtgaaggaactgattaaaaagtgggagaaacaggtcagccaaaagaaaaagcaaaagaatgggaaaaaacatcaaaaaaagaaagttctgaaagttcgaaaatctcaacgttctcgtcaaaagaagactacataagagaccacttcaccaataagtattctgtgttaaaaatgttctattttaattataccgctatcattccaaaggaggatggcatataatacaaaggcttattaatttgactagaaaatttaaaacattactctgaaattgtaactaaagttagaaagttgattttaagaatccaaacgttaagaattgttaaaggctatgattgtctttgttcttctaccacccaccagttgaatttcatcatgcttaaggccatgattttagcaatacccatgtctacacagatgttcacccaaccacatcccactcacaacagctgcctggaagagcagccctaggcttccacgtactgcagcctccagagagtatctgaggcacatgtcagcaagtcctaagcctgttagcatgctggtgagccaagcagtttgaaattgagctggacctcaccaagctgctgtggccatcaacctctgtatttgaatcagcctacaggcctcacacacaatgtgtctgagagattcatgctgattgttattgggtatcaccactggagatcaccagtgtgtggctttcagagcctcctttctggctttggaagccatgtgattccatcttgcccgctcaggctgaccactttatttctttttgttcccctttgcttcattcaagtcagctcttctccatcctaccacaatgcagtgcctttcttctctccagtgcacctgtcatatgctctgatttatctgagtcaactcctttctcatcttgtccccaacaccccacagaagtgctttcttctcccaattcatcctcactcagtccagcttagttcaagtcctgcctcttaaataaacctttttggacacacaaattatcttaaaactcctgtttcacttggttcagtaccacatgggtgaacactcaatggttaactaattcttgggtgtttatcctatctctccaaccagattgtcagctccttgagggcaagagccacagtatatttccctgtttcttccacagtgcctaataatactgtggaactaggttttaataattttttaattgatgttgttatgggcaggatggcaaccagaccattgtctcagagcaggtgctggctctttcctggctactccatgttggctagcctctggtaacctcttacttattatcttcaggacactcactacagggaccagggatgatgcaacatccttgtctttttatgacaggatgtttgctcagcttctccaacaataagaagcacgtggtaaaacacttgcggatattctggactgtttttaaaaaatatacagtttaccgaaaatcatataatcttacaatgaaaaggactttatagatcagccagtgaccaaccttttcccaaccatacaaaaattccttttcccgaaggaaaagggctttctcaataagcctcagctttctaagatctaacaagatagccaccgagatccttatcgaaactcattttaggcaaatatgagttttattgtccgtttacttgtttcagagtttgtattgtgattatcaattaccacaccatctcccatgaagaaagggaacggtgaagtactaagcgctagaggaagcagccaagtcggttagtggaagcatgattggtgcccagttagcctctgcaggatgtggaaacctccttccaggggaggttcagtgaattgtgtaggagaggttgtctgtggccagaatttaaacctatactcactttcccaaattgaatcactgctcacactgctgatgatttagagtgctgtccggtggagatcccacccgaacgtcttatctaatcatgaaactccctagttccttcatgtaacttccctgaaaaatctaagtgtttcataaatttgagagtctgtgacccacttaccttgcatctcacaggtagacagtatataactaacaaccaaagactacatattgtcactgacacacacgttataatcatttatcatatatatacatacatgcatacactctcaaagcaaataatttttcacttcaaaacagtattgacttgtataccttgtaatttgaaatattttctttgttaaaatagaatggtatcaataaatagaccattaatcag

SEQ ID NO: 1235 - DNA, 2224 bp, Homo sapiens
  Genbank Accession No. X75958
cagagccgcaagcgcagggaaggcctccccgcacggtgggggaaagcggccggtgcagcgcggggacaggcactcgggctggcactggctgctagggatgtcgtcctggataaggtggcatggacccgccatggcgcggctctggggcttctgctggctggttgtgggcttctggagggccgctttcgcctgtcccacgtcctgcaaatgcagtgcctctcggatctggtgcagcgacccttctcctggcatcgtggcatttccgagattggagcctaacagtgtagatcctgagaacatcaccgaaattttcatcgcaaaccagaaaaggttagaaatcatcaacgaagatgatgttgaagcttatgtgggactgagaaatctgacaattgtggattctggattaaaatttgtggctcataaagcatttctgaaaaacagcaacctgcagcacatcaattttacccgaaacaaactgacgagtttgtctaggaaacatttccgtcaccttgacttgtctgaactgatcctggtgggcaatccatttacatgctcctgtgacattatgtggatcaagactctccaagaggctaaatccagtccagacactcaggatttgtactgcctgaatgaaagcagcaagaatattcccctggcaaacctgcagatacccaattgtggtttgccatctgcaaatctggccgcacctaacctcactgtggaggaaggaaagtctatcacattatcctgtagtgtggcaggtgatccggttcctaatatgtattgggatgttggtaacctggtttccaaacacatgaatgaaacaagccacacacagggctccttaaggataactaacatttcatccgatgacagtgggaagcagatctcttgtgtggcggaaaatcttgtaggagaagatcaagattctgtcaacctcactgtgcattttgcaccaactatcacatttctcgaatctccaacctcagaccaccactggtgcattccattcactgtgaaaggcaaccccaaaccagcgcttcagtggttctataacggggcaatattgaatgagtccaaatacatctgtactaaaatacatgttaccaatcacacggagtaccacggctgcctccagctggataatcccactcacatgaacaatggggactacactctaatagccaagaatgagtatgggaaggatgagaaacagatttctgctcacttcatgggctggcctggaattgacgatggtgcaaacccaaattatcctgatgtaatttatgaagattatggaactgcagcgaatgacatcggggacaccacgaacagaagtaatgaaatcccttccacagacgtcactgataaaaccggtcgggaacatctctcggtctatgctgtggtggtgattgcgtctgtggtgggattttgccttttggtaatgctgtttctgcttaagttggcaagacactccaagtttggcatgaaaggttttgttttgtttcataagatcccactggatgggtagctgaaataaaagaaaagacagagaaaggggctgtggtgcttgttggttgatgctgccatgtaagctggactcctgggactgctgttggcttatcccgggaagtgctgcttatctggggttttctggtagatgtgggcggtgtttggaggctgtactatatgaagcctgcatatactgtgagctgtgattggggaacaccaatgcagaggtaactctcaggcagctaagcagcacctcaagaaaacatgttaaattaatgcttctcttcttacagtagttcaaatacaaaactgaaatgaaatcccattggattgtacttctcttctgaaaagtgtgctttttgaccctactggacatttattgacttaattgcttctgtttattaaaattgacctgcaaagttaaaaaaaaattaaagttgagaacaggtataagtgcacactgaatagtctaatctacatgtaacacatattttagtatgattttctatactctaatcagcactgaattcagagggtttgactttttcatctataacacagtgactaaaagagttaagggtatatataccatcactttgggacttggtagtattattaaaaggttatttccttcactgtcaataaaagtccaaatgtttagcttaggtctgagagtcaaacaatgttaaggattgtcttaaagttccttagc

SEQ ID NO: 1236 - DNA, 558 bp, Homo sapiens
  Genbank Accession No. X84721
  misc_feature (1)..(558): n = a or c or g or t
ccggaaagttcgctcaagtatgatgccaccacccgccagattgagatcccccttgnccaaagtcgccctntaaaacgactcacnataggganancgaattcgcggccgcgtcgaactgggccccgcgcgcgccctccgcgagggtggagncggcggctgtgtgcgcagggcccggcaccggactgggaccctggcgtccctccaggccttgcctcctgcgggaggacagtttggcttcacttctctgaccccagcctcggccgtaaagtgaaagagaccggaccagcttcagctttcggactctggttcttggatcgtgtcctctccccntcaccgccctcttcccccaatctgagccattgcaggcctctgcctgctgccccctctctcctcgggatcgggtccccagagccaccatctcctgagcctcccaccccgctgcctgggccctgtggttgctgggcctcccacctcaaggaggggaaggttgtacagcccgaacccgtggagcaatgccctgtctggcctccaaaaccaaaataaaactgggtcacttta

SEQ ID NO: 1237 - DNA, 1130 bp, Homo sapiens
  Genbank Accession No. X93510
tgagagtccggctcaggctccggctgcggctccagcccgcgatgccccattccgtgaccctgcgcgggccttcgccctggggcttccgcctggtgggccgggacttcagcgcgcccctcaccatctcacgggtccatgctggcagcaaggcctcattggctgccctgtgcccaggagacctgatccaggccatcaatggtgagagcacagagctcatgacacacctggaggcacagaaccgcatcaagggctgccacgatcacctcacactgtctgtgagcaggcctgagggcaggagctggcccagtgcccctgatgacagcaaggctcaggcacacaggatccacatcgatcctgagatccaggacggcagcccaacaaccagcaggcggccctcaggcaccgggactgggccagaagatggcagaccaagcctgggatctccatatggaaaacccccttgctttccagtccctcacaatggcagcagcgaggccaccctgccagcccagatgagcaccctgcatgtgtctccaccccccagcgctgacccagcagaggcctcccgcggagccgggagcagagtcgacctgggctccgaggtgtacaggatgctgcgggagccggccgagcccgtggccgcggagcccaagcagtcaggctccttccgctacttgcagggcatgctagaggccggcgagggcggggattggcccgggcctggcggcccccggaacctcaagcccacggccagcaagctgggcgctccgctgagcggcctgcaggggctgcccgagtgcacgcgctgctgccacggaatcgtgggcaccatcgtcaaggaacgggacaagctctaccatcccgagtgcttcatgtgcagtgactgcggcctgaacctcaagcagcgtggttacttctttctggacgagcggctctactgtgagagccacgccaaggcgcgcgtgaagccgcccgagggctacgacgtggtggcggtgtaccccaatgccaaggtggaactcgtctgagctgggaccctgctcccacccctgcttcttaaggtccctgctcggccggtgtaaatatgtttcaccctgtccctctaataaagctcctctgctcaaaaaaaa

SEQ ID NO: 1238 - DNA, 576 bp, Homo sapiens
  Genbank Accession No. Y10179
cttctctgggacacattgccttctgttttctccagcatgcgcttgctccagctcctgttcagggccagccctgccaccctgctcctggttctctgcctgcagttgggggccaacaaagctcaggacaacactcggaagatcataataaagaattttgacattcccaagtcagtacgtccaaatgacgaagtcactgcagtgcttgcagttcaaacagaattgaaagaatgcatggtggttaaaacttacctcattagcagcatccctctacaaggtgcatttaactataagtatactgcctgcctatgtgacgacaatccaaaaaccttctactgggacttttacaccaacagaactgtgcaaattgcagccgtcgttgatgttattcgggaattaggcatctgccctgatgatgctgctgtaatccccatcaaaaacaaccggttttatactattgaaatcctaaaggtagaataatggaagccctgtctgtttgccacacccaggtgatttcctctaaagaaacttggctggaatttctgctgtggtctataaaataaacttcttaacatgctt

SEQ ID NO: 1239 - DNA, 2444 bp, Homo sapiens
  Genbank Accession No. Y11306
ggttttttttttttaccccccttttttatttattatttttttgcacattgagcggatccttgggaacgagagaaaaaagaaacccaaactcacgcgtgcagaagatctccccccccttcccctcccctcctccctcttttcccctccccaggagaaaaagacccccaagcagaaaaaagttcaccttggactcgtctttttcttgcaatattttttgggggggcaaaactttgagggggtgattttttttggcttttcttcctccttcatttttcttccaaaattgctgctggtgggtgaaaaaaaaatgccgcagctgaacggcggtggaggggatgacctaggcgccaacgacgaactgatttccttcaaagacgagggcgaacaggaggagaagagctccgaaaactcctcggcagagagggatttagctgatgtcaaatcgtctctagtcaatgaatcagaaacgaatcaaaacagctcctccgattccgaggcggaaagacggcctccgcctcgctccgaaagtttccgagacaaatcccgggaaagtttggaagaagcggccaagaggcaagatggagggctctttaaggggccaccgtatcccggctaccccttcatcatgatccccgacctgacgagcccctacctccccaacggatcgctctcgcccaccgcccgaacctatctccagatgaaatggccactgcttgatgtccaggcagggagcctccagagtagacaagccctcaaggatgcccggtccccatcaccggcacacattgtctctaacaaagtgccagtggtgcagcaccctcaccatgtccaccccctcacgcctcttatcacgtacagcaatgaacacttcacgccgggaaacccacctccacacttaccagccgacgtagaccccaaaacaggaatcccacggcctccgcaccctccagatatatccccgtattacccactatcgcctggcaccgtaggacaaatcccccatccgctaggatggttagtaccacagcaaggtcaaccagtgtacccaatcacgacaggaggattcagacacccctaccccacagctctgaccgtcaatgcttccgtgtccaggttccctccccatatggtcccaccacatcatacgctacacacgacgggcattccgcatccggccatagtcacaccaacagtcaaacaggaatcgtcccagagtgatgtcggctcactccatagttcaaagcatcaggactccaaaaaggaagaagaaaagaagaagccccacataaagaaacctcttaatgcattcatgttgtatatgaaggaaatgagagcaaaggtcgtagctgagtgcacgttgaaagaaagcgcggccatcaaccagatccttgggcggaggtggcatgcactgtccagagaagagcaagcgaaatactacgagctggcccggaaggagcgacagcttcatatgcaactgtaccccggctggtccgcgcgggataactatggaaagaagaagaagaggaaaagggacaagcagccgggagagaccaatgaacacagcgaatgtttcctaaatccttgcctttcacttcctccgattacagacctcagcgctcctaagaaatgccgagcgcgctttggccttgatcaacagaataactggtgcggcccttgcaggagaaaaaaaaagtgcgttcgctacatacaaggtgaaggcagctgcctcagcccaccctcttcagatggaagcttactagattcgcctcccccctccccgaacctgctaggctcccctccccgagacgccaagtcacagactgagcagacccagcctctgtcgctgtccctgaagcccgaccccctggcccacctgtccatgatgcctccgccacccgccctcctgctcgctgaggccacccacaaggcctccgccctctgtcccaacggggccctggacctgcccccagccgctttgcagcctgccgccccctcctcatcaattgcacagccgtcgacttcttggttacattcccacagctccctggccgggacccagccccagccgctgtcgctcgtcaccaagtctttagaatagctttagcgtcgtgaaccccgctgctttgtttatggttttgtttcacttttcttaatttgccccccacccccaccttgaaaggttttgttttgtactctcttaattttgtgccatgtggctacattagttgatgtttatcgagttcattggtcaatatttgacccattcttatttcaatttctccttttaaatatgtagatgagagaagaacctcatgattggtaccaaaatttttatcaacagctgtttaaagtctttgtagcgtttaaaaaatatatatatatacataactgttatgtagttcggatagcttagttttaaaagactgattaaaaaacaaaaaaaa

SEQ ID NO: 1240 - DNA, 1068 bp, Homo sapiens
  Genbank Accession No. Y15915
ggccctgctggtcccactggagctcgtggtgcccccggagaccgtggtgagcctggtccccccggccctgctggctttgctggcccccctggtgctgacggccaacctggtgctaaaggcgaacctggtgatgctggtgccaaaggcgatgctggtccccctgggcctgccggacccgctggaccccctggccccattggtaatgttggtgctcctggagccaaaggtgctcgcggcagcgctggtccccctggtgctactggtttccctggtgctgctggccgagtcggtcctcctggcccctctggaaatgctggaccccctggccctcctggtcctgctggcaaagaaggcggcaaaggtccccgtggtgagactggccctgctggacgtcctggtgaagttggtccccctggtccccctggccctgctggcgagaaaggatcccctggtgctgatggtcctgctggtgctcctggtactcccgggcctcaaggtattgctggacagcgtggtgtggtcggcctgcctggtcagagaggagagagaggcttccctggtcttcctggcccctctggtgaacctggcaaacaaggtccctctggagcaagtggtgaacgtggtccccccggtcccatgggcccccctggattggctggaccccctggtgaatctggacgtgagggggctcctgctgccgaaggttcccctggacgagacggttctcctggcgccaagggtgaccgtggtgagaccggccccgctggaccccctggtgctctggtgctctggtgcccctggccccgttggccctgctggcaagagtggtgatcgtggtgagactggtcctgctggtcccgccggtcctgtcggccctgttggcgcccgtggccccgccggaccccaaggcccccgtggtgacaagggtgagacaggcgaacagggcgacagaggcataaagggtcaccgtggcttctctggcctccagggtccccctggccctcctggggaccccattcccgaggagctttatgagatgctgagtgaccactcgatccgctcctttga

SEQ ID NO: 1241 - DNA, 4849 bp, Homo sapiens
  Genbank Accession No. Y16961
cgttgatatcaaagacagttgaaggaaatgaattttgaaacttcacggtgtgccaccctacagtactgccctgacccttacatccagcgtttcgtagaaaccccagctcatttctcttggaaagaaagttattaccgatccaccatgtcccagagcacacagacaaatgaattcctcagtccagaggttttccagcatatctgggattttctggaacagcctatatgttcagttcagcccattgacttgaactttgtggatgaaccatcagaagatggtgcgacaaacaagattgagattagcatggactgtatccgcatgcaggactcggacctgagtgaccccatgtggccacagtacacgaacctggggctcctgaacagcatggaccagcagattcagaacggctcctcgtccaccagtccctataacacagaccacgcgcagaacagcgtcacggcgccctcgccctacgcacagcccagctccaccttcgatgctctctctccatcacccgccatcccctccaacaccgactacccaggcccgcacagtttcgacgtgtccttccagcagtcgagcaccgccaagtcggccacctggacgtattccactgaactgaagaaactctactgccaaattgcaaagacatgccccatccagatcaaggtgatgaccccacctcctcagggagctgttatccgcgccatgcctgtctacaaaaaagctgagcacgtcacggaggtggtgaagcggtgccccaaccatgagctgagccgtgaattcaacgagggacagattgcccctcctagtcatttgattcgagtagaggggaacagccatgcccagtatgtagaagatcccatcacaggaagacagagtgtgctggtaccttatgagccaccccaggttggcactgaattcacgacagtcttgtacaatttcatgtgtaacagcagttgtgttggagggatgaaccgccgtccaattttaatcattgttactctggaaaccagagatgggcaagtcctgggccgacgctgctttgaggcccggatctgtgcttgcccaggaagagacaggaaggcggatgaagatagcatcagaaagcagcaagtttcggacagtacaaagaacggtgatggtacgaagcgcccgtttcgtcagaacacacatggtatccagatgacatccatcaagaaacgaagatccccagatgatgaactgttatacttaccagtgaggggccgtgagacttatgaaatgctgttgaagatcaaagagtccctggaactcatgcagtaccttcctcagcacacaattgaaacgtacaggcaacagcaacagcagcagcaccagcacttacttcagaaacagacctcaatacagtctccatcttcatatggtaacagctccccacctctgaacaaaatgaacagcatgaacaagctgccttctgtgagccagcttatcaaccctcagcagcgcaacgccctcactcctacaaccattcctgatggcatgggagccaacattcccatgatgggcacccacatgccaatggctggagacatgaatggactcagccccacccaggcactccctcccccactctccatgccatccacctcccagtgcacacccccacctccgtatcccacagattgcagcattgtcagtttcttagcgaggttgggctgttcatcatgtctggactatttcacgacccaggggctgaccaccatctatcagattgagcattactccatggatgatctggcaagtctgaaaatccctgagcaatttcgacatgcgatctggaagggcatcctggaccaccggcagctccacgaattctcctccccttctcatctcctgcggaccccaagcagtgcctctacagtcagtgtgggctccagtgagacccggggtgagcgtgttattgatgctgtgcgattcaccctccgccagaccatctctttcccaccccgagatgagtggaatgacttcaactttgacatggatgctcgccgcaataagcaacagcgcatcaaagaggagggggagtgagcctcaccatgtgagctcttcctatccctctcctaactgccagcyccctaaaagcactcctgcttaatcttcaaagccttctccctagctcctccccttcctcttgtctgatttcttaggggaaggagaagtaagaggctacctcttacctaacatctgacctggcatctaattctgattctggctttaagccttcaaaactatagcttgcagaactgtagctgccatggctaggtagaagtgagcaaaaaagagttgggtgtctccttaagctgcagagatttctcattgacttttataaagcatgttcacccttatagtctaagactatatatataaatgtataaatatacagtatagatttttgggtggggggcattgagtattgtttaaaatgtaatttaaatgaaagaaaattgagttgcacttattgaccattttttaatttacttgttttggatggcttgtctatactccttcccttaaggggtatcatgtatggtgataggtatctagagcttaatgctacatgtgagtgacgatgatgtacagattctttcagttctttggattctaaatacatgccacatcaaacctttgagtagatccatttccattgcttattatgtaggtaagactgtagatatgtattcttttctcagtgttggtatattttatattactgacatttcttctagtgatgatggttcacgttggggtgatttaatccagttataagaagaagttcatgtccaaacgtcctctttagtttttggttgggaatgaggaaaattcttaaaaggcccatagcagccagttcaaaaacacccgacgtcatgtatttgagcatatcagtaacccccttaaatttaataccagataccttatcttacaatattgattgggaaaacatttgctgccattacagaggtattaaaactaaatttcactactagattgactaactcaaatacacatttgctactgttgtaagaattctgattgatttgattgggatgaatgccatctatctagttctaacagtgaagttttactgtctattaatattcagggtaaataggaatcattcagaaatgttgagtctgtactaaacagtaagatatctcaatgaaccataaattcaactttgtaaaaatcttttgaagcatagataatattgtttggtaaatgtttcttttgtttggtaaatgtttcttttaaagaccctcctattctataaaactctgcatgtagaggcttgtttacctttctctctctaaggtttacaataggagtggtgatttgaaaaatataaaattatgagattggttttcctgtggcataaattgcatcactgtatcattttcttttttaaccggtaagagtttcagtttgttggaaagtaactgtgagaacccagtttcccgtccatctcccttagggactacccatagacatgaaaggtccccacagagcaagagataagtctttcatggctgctgttgcttaaaccacttaaacgaagagttcccttgaaactttgggaaaacatgttaatgacaatattccagatctttcagaaatataacacatttttttgcatgcatgcaaatgagctctgaaatcttcccatgcattctggtcaagggctgtcattgcacataagcttccattttaattttaaagtgcaaaagggccagcgtggctctaaaaggtaatgtgtggattgcctctgaaaagtgtgtatatattttgtgtgaaattgcatactttgtattttgattattttttttttcttcttgggatagtgggatttccagaaccacacttgaaacctttttttatcgtttttgtattttcatgaaaataccatttagtaagaataccacatcaaataagaaataatgctacaattttaagaggggagggaagggaaagtttttttttattatttttttaaaattttgtatgttaaagagaatgagtccttgatttcaaagttttgttgtacttaaatggtaataagcactgtaaacttctgcaacaagcatgcagctttgcaaacccattaaggggaagaatgaaagctgttccttggtcctagtaagaagacaaactgcttcccttactttgctgagggtttgaataaacctaggacttccgagctatgtcagtactattcaggtaacactagggccttggaaattcctgtactgtgtctcatggatttggcactagccaaagcgaggcacccttactggcttacctcctcatggcagcctactctccttgagtgtatgagtagccagggtaaggggtaaaaggatagtaagcatagaaaccactagaaagtgggcttaatggagttcttgtggcctcagctcaatgcagttagctgaagaattgaaaagtttttgtttggagacgtttataaacagaaatggaaagcagagttttcattaaatccttttaccttttttttttcttggtaatcccctaaaataacagtatgtgggatattgaatgttaaagggatattttttttctattatttttataattgtacaaaattaagcaaatgttaaaagttttatatgctttattaatgttttcaaaaggtattatacatgtgatacattttttaagcttcagttgcttgtcttctggtactttctgttatgggcttttggggagccagaagccaatctacaatctctttttgtttgccaggacatgcaataaaatttaaaaaataaataaaaactaattaagaaataaa

SEQ ID NO: 1242 - DNA, 5260 bp, Homo sapiens
  Genbank Accession No. Z19574
tggaaacagaggagcaagcctgttgtaatcgctacgcccacttggtggcctataaaggaagcgggcgaaccccggcagccctacacaacttggggcccctctcctctccagcccttctcctgtgtgcctgcctcctgccgccgccaccatgaccacctccatccgccagttcacctcctccagctccatcaagggctcctccggcctggggggcggctcgtcccgcacctcctgccggctgtctggcggcctgggtgccggctcctgcaggctgggatctgctggcggcctgggcagcaccctcgggggtagcagctactccagctgctacagctttggctctggtggtggctatggcagcagctttgggggtgttgatgggctgctggctggaggtgagaaggccaccatgcagaacctcaatgaccgcctggcctcctacctggacaaggtgcgtgccctggaggaggccaacactgagctggaggtgaagatccgtgactggtaccagaggcaggccccggggcccgcccgtgactacagccagtactacaggacaattgaggagctgcagaacaaggtagggcctgctggtgggaggggtctccggggggcatgacttcttccccccaactcctgccttggccaaaggcctggagtccagccatagggtctcagggagccaagggtggtttggctgtggcttagcttctgggaacctgccttggggcccctgtgtggctcacatcccccttttctggggacagcaagctgagtcaggaacaaagaggccttgtggagccccttggagcctcagtttctccctcgtggagctccgccacctggagaggttgtaggatgaggcaggaggatgcagatggagggctgggcccgtgggctgctggatgtgtggtgtcttgctcctttggagcaggggtcaacaggagggggttttgggtgatgtggagtgggggtgtctgagtgagctcctgatagcacctgctgcaggaggaggcagaaaggagggggcgggacctcagtgtggggaaggcctctgatgtgccttatttggggatttttctggcttctcctttcctcctgctgtcccttaagacgggctcagcaaaccccagggggcggggctgctggctggcgcccagggttagggattaggaggggtcctgacttttgatttggaaccactctttaatgagggctcctttagcctccttttgggggagcctgtcaggggcaccctctagctgactgtaaaacgagggggttgcccacatcccctcccttgttctagaattctgggacagcttctgccctggggacattttcccattcttttctggttgcctcatactcccagccagctgtctcttctcctttaaggccgagcctgccatgggggtctggtggggtactgagtatcgggggaagaagaggcacctttcagcccttcagactcctgtttgcccctcctctgccaataatacagcacggggcaagggaggggctgggcgagaagagaggccctgaggcaggaagatctgctcagaaccctggtgtgggctcagccacccccatccaatgacctgactactctcccttctcctcagatcctcacagccaccgtggacaatgccaacatcctgctacagattgacaatgcccgtctggctgctgatgacttccgcaccaagtgagtcctagctgtggccttgggcagcctgggccagctggcggaggatctcagggtacccctcctgaccccaggattccttggttgcttgtggcaaggcccaggagctcagggtggggcagtcctaggagccccactccttagtccaggatgcagtgaaggcagccagttctgaaggttgctgagcttaggcagggaatagaagagaaggaggggaggcgggaggcgggaggcagagagaagtaaggaagctggtgggcgtgggatctggccctgtgatggtcccggggtcccggggctggaattcgtttccactcgaccctctcatcagcccttccaactccttagagtcctggcaaaatgaaggcaggtgagcagccaggacctggatctgcaggtccaagcagcctgggctgaagtctctgattcccacggcaggtttgagacagagcaggccctgcgcctgagtgtggaggccgacatcaatggcctgcgcagggtgctggatgagctgaccctggccagagccgacctggagatgcagattgagaacctcaaggaggagctggcctacctgaagaagaaccacgaggaggtgaggtggctggggcagaaggtcaaagatgctgaggagtgggtggcagagccctggggctgggcaatggctgaggccgtgggagagagcagagcaggtgcaccgggattagtcaccttagagggcttccctgtctgcagagccctgatccttggggtccagtgtgcagggcagactcctctttgtaccacactgcttctctgtacacaaggaacctcccaggggcctgcagaggctccctctacctaccctgcctccctcatgagggtgggggataagtaaggaaatcttgtcccatttcaaactctcaaagctgaacatctacatagaagcttggaaattagaggggaacttttgggggcataggcctaataattagattttattttggagagtccttggtctaatgggggagatagagtctgatggtggaggcaatactgagcagatgaataaaaatcatttagagggtcagatagagcagagggagaacaaaggaggggtccttgtgggaagtggggtccccttgtgggggaaggcttgggagtgagaggtcaggatgggtccagatgcgcacatccacatcccctttttccataggagatgaacgccctgcgaggccaggtgggtggtgagatcaatgtggagatggacgctgccccaggcgtggacctgagccgcatcctcaacgagatgcgtgaccagtatgagaagatggcagagaagaaccgcaaggatgccgaggattggttcttcagcaaggtggggggtgctgcaggccagagggctctcttaggggctggggctcaggggccttagcactgacagtaagcccacggccagatgtcttggaggtgcccctcctcagtaagctgcatggaccacagggtcacccactgcatcaacagacatggagctgagctcaagctgggatctggcgggtgggtggggaggtagggagctccctcagaataaaggcagagggtaaagaccttgggagtccccacgtctccctcaagaagtcaggaactagcatcaagagccaggctacatgttctggcttgttctcaagtttccggtctgtgcctcccacacgctgggattaaccataaaaagttaacatttcaaatggcatgtttctgggctttgggatgtgggaagctggtgagaaggcacactctctccacagttagatttgggaggaggcctgacttgggagagggatccaggctcacaccgccctgtcctgtgtcctgtctgcagacagaggaactgaaccgcgaggtggccaccaacagtgagctggtgcagagtggcaagagtgagatctcggagctccggcgcaccatgcaggccttggagatagagctgcagtcccagctcagcatggtaggaacagtcctgtgcatgggggagggcccagaagagggcattgaccatcctcactgacccctggtcttcctgccctcctgcagaaagcatccctggagggcaacctggcggagacagagaaccgctactgcgtgcagctgtcccagatccaggggctgattggcagcgtggaggagcagctggcccagcttcgctgcgagatggagcagcagaaccaggaatacaaaatcctgctggatgtgaagacgcggctggagcaggagattgccacctaccgccgcctgctggagggagaggatgcccagtgagtgggggcgcctggggtcagggctgggggtctcttggcaggggtggggctctcagacccacatctaatttcctctctgtttttttttttctttcagcctgactcagtacaagaaagaacgtaagtatctgcgtggcttcggccctgggggttgggtgcatgggacaggcagcccacctgcacgttgctggggcagggtccccaggagctccaggagttgatggctgtccctcagcagggagaagtgactcattagcactgaggattgatactcaggaaaagatcaaatgagagagacactgtctggtctgatgggggtggggcagggaactggtccttaccttggagatcctagtctgatggaggagacaggtcccagctctggagattgtcatctgatgggaagataggaacatggtctcatgatctttgctcttgacagcttttggatgagcaaaaacagtcctgtctctggggtctgtagcctgatgggagatagggacatggtccttgtcctccaaattccaatctgatggagaatatatgatcctagccttagggttcctagtctaatggaggagataggggcctggtttttgtcttggcgatcccagtctgatgggggagatggtagaaaatctatgtcctagagactgcagagaaatggagacggatttcatggagtctacatggctcctccctggcaggacacactggatcagaatcaaataacccatctggggaggcaagactcacacagggccaccggcagagggatgggatggaagggaggtggtggcagggacaggagggatgtgtgtgcagtgtgatgtcgaggtgccagtggaggcactcacagcacctgggggaggatgagggagagagccggctcctgtccatgagggctagggggcaagcgagggcctcctggcccctacccactttaaattgcctgcttctcctgcagcggtgaccacccgtcaggtgcgtaccattgtggaagaggtccaggatggcaaggtcatctcctcccgcgagcaggtccaccagaccacccgctgaggactcagctaccccggccggccacccaggaggcagggaggcagccgccccatctgccccacagtctccggcctctccagcctcagccccctgcttcagtcccttccccatgcttccttgcctgatgacaataaagcttgttgactcagctatgaaatgtgtccttgttctggcccctgaagtggggactagggac

SEQ ID NO: 1243 - DNA, 729 bp, Homo sapiens
  Genbank Accession No. Z22865
gaattcgggagcatggacctcagtcttctctgggtacttatgcccctagtcaccatggcctggggccagtatggcgattatggatacccataccagcagtatcatgactacagcgatgatgggtgggtgaatttgaatcggcaaggcttcagctaccagtgtccccaggggcaggtgatagtggccgtgaggagcatcttcagtaagaaggaaggttctgacagacaatggaactacgcctgcatgcccacgccacagagcctcggggaacccacggagtgctggtgggaggagatcaacagggctggcatggaatggtaccagacgtgctccaacaatgggctggtggcaggattccagagccgctacttcgagtcagtgctggatcgggagtggcagttttactgttgtcgctacagcaagaggtgcccatattcctgctggctaacaacagaatatccaggtcactatggtgaggaaatggacatgatttcctacaattatgattactatatccgaggagcaacaaccactttctctgcagtggaaagggatcgccagtggaagttcataatgtgccggatgactgaatacgactgtgaatttgcaaatgtttagatttgccacataccaaatctgggtgaaaggaaaggggccctccagctttccactgcagagaaagtggttgttgctcctcggtatatgtaatcataattgtagatcgaattc

SEQ ID NO: 1244 - DNA, 9534 bp, Homo sapiens
  Genbank Accession No. Z26653
cagcgactcctctggctcccgagaagtggatccggtcgcggccactacgatgccgggagccgccggggtcctcctccttctgctgctctccggaggcctcgggggcgtacaggcgcagcggccgcagcagcagcggcagtcacaggcacatcagcaaagaggtttattccctgctgtcctgaatcttgcttctaatgctcttatcacgaccaatgcaacatgtggagaaaaaggacctgaaatgtactgcaaattggtagaacatgtccctgggcagcctgtgaggaacccgcagtgtcgaatctgcaatcaaaacagcagcaatccaaaccagagacacccgattacaaatgctattgatggaaagaacacttggtggcagagtcccagtattaagaatggaatcgaataccattatgtgacaattacactggatttacagcaggtgttccagatcgcgtatgtgattgtgaaggcagctaactccccccggcctggaaactggattttggaacgctctcttgatgatgttgaatacaagccctggcagtatcatgctgtgacagacacggagtgcctaacgctttacaatatttatccccgcactgggccaccgtcatatgccaaagatgatgaggtcatctgcacttcattttactccaagatacaccccttagaaaatggagagattcacatctctttaatcaatgggagaccaagtgccgatgatccttctccagaactgctagaatttacctccgctcgctatattcgcctgagatttcagaggatccgcacactgaatgctgacttgatgatgtttgctcacaaagacccaagagaaattgaccccattgtcaccagaagatattactactcggtcaaggatatttcagttggagggatgtgcatctgctatggtcatgccagggcttgtccacttgatccagcgacaaataaatctcgctgtgagtgtgagcataacacatgtggcgatagctgtgatcagtgctgtccaggattccatcagaaaccctggagagctggaacttttctaactaaaactgaatgtgaagcatgcaattgtcatggaaaagctgaagaatgctattatgatgaaaatgttgccagaagaaatctgagtttgaatatacgtggaaagtacattggagggggtgtctgcattaattgtacccaaaacactgctggtataaactgcgagacatgtacagatggcttcttcagacccaaaggggtatctccaaattatccaaggccatgccagccatgtcattgcgatccaattggttccttaaatgaagtctgtgtcaaggatgagaaacatgctcgacgaggtttggcacctggatcctgtcattgcaaaactggttttggaggtgtgagctgtgatcggtgtgccaggggctacactggctacccggactgcaaagcctgtaactgcagtgggttagggagcaaaaatgaggatccttgttttggcccctgtatctgcaaggaaaatgttgaaggaggagactgtagtcgttgcaaatccggcttcttcaatttgcaagaggataattggaaaggctgcgatgagtgtttctgttcaggggtttcaaacagatgtcagagttcctactggacctatggcaaaatacaagatatgagtggctggtatctgactgaccttcctggccgcattcgagtggctccccagcaggacgacttggactcacctcagcagatcagcatcagtaacgcggaggcccggcaagccctgccgcacagctactactggagcgcgccggctccctatctgggaaacaaactcccagcagtaggaggacagttgacatttaccatatcatatgaccttgaagaagaggaagaagatacagaacgtgttctccagcttatgattatcttagagggtaatgacttgagcatcagcacagcccaagatgaggtgtacctgcacccatctgaagaacatactaatgtattgttacttaaagaagaatcatttaccatacatggcacacattttccagtccgtagaaaggaatttatgacagtgcttgcgaatttgaagagagtcctcctacaaatcacatacagctttgggatggatgccatcttcaggttgagctctgttaaccttgaatccgctgtctcctatcctactgatggaagcattgcagcagctgtagaagtgtgtcagtgcccaccagggtatactggctcctcttgtgaatcttgttggcctaggcacaggcgagttaacggcactatttttggtggcatctgtgagccatgtcagtgctttggtcatgcggagtcctgtgatgacgtcactggagaatgcctgaactgtaaggatcacacaggtggcccatattgtgataaatgtcttcctggtttctatggcgagcctactaaaggaacctctgaagactgtcaaccctgtgcctgtccactcaatatcccatccaataactttagcccaacgtgccatttagaccggagtcttggattgatctgtgatggatgccctgtcgggtacacaggaccacgctgtgagaggtgtgcagaaggctattttggacaaccctctgtacctggaggatcatgtcagccatgccaatgcaatgacaaccttgacttctccatccctggcagctgtgacagcttgtctggctcctgtctgatatgtaaaccaggtacaacaggccggtactgtgagctctgtgctgatggatattttggagatgcagttgatgcgaagaactgtcagccctgtcgctgtaatgccggtggctctttctctgaggtttgccacagtcaaactggacagtgtgagtgcagagccaacgttcagggtcagagatgtgacaaatgcaaggctgggacctttggcctacaatcagcaaggggctgtgttccctgcaactgcaattcttttgggtctaagtcattcgactgtgaagagagtggacaatgttggtgccaacctggagtcacagggaagaaatgtgaccgctgtgcccacggctatttcaacttccaagaaggaggctgcacagcttgtgaatgttctcatctgggtaataattgtgacccaaagactgggcgatgcatttgcccacccaataccattggagagaaatgttctaaatgtgcacccaatacctggggccacagcattaccactggttgtaaggcttgtaactgcagcacagtgggatccttggatttccaatgcaatgtaaatacaggccaatgcaactgtcatccaaaattctctggtgcaaaatgtacagagtgcagtcgaggtcactggaactaccctcgctgcaatctctgtgactgcttcctccctgggacagatgccacaacctgtgattcagagactaaaaaatgctcctgtagtgatcaaactgggcagtgcacttgtaaggtgaatgtggaaggcatccactgtgacagatgccggcctggcaaattcggactcgatgccaagaatccacttggctgcagcagctgctattgcttcggcactactacccagtgctctgaagcaaaaggactgatccggacgtgggtgactctgaaggctgagcagaccattctacccctggtagatgaggctctgcagcacacgaccaccaagggcattgtttttcaacatccagagattgttgcccacatggacctgatgagagaagatctccatttggaacctttttattggaaacttccagaacaatttgaaggaaagaagttgatggcctatgggggcaaactcaagtatgcaatctatttcgaggctcgggaagaaacaggtttctctacatataatcctcaagtgatcattcgaggtgggacacctactcatgctagaattatcgtcaggcatatggctgctcctctgattggccaattgacaaggcatgaaattgaaatgacagagaaagaatggaaatattatggggatgatcctcgagtccatagaactgtgacccgagaagacttcttggatatactatatgatattcattacattcttatcaaagctacttatggaaatttcatgcgacaaagcaggatttctgaaatctcaatggaggtagctgaacaaggacgtggaacaacaatgactcctccagctgacttgattgaaaaatgtgattgtcccctgggctattctggcctgtcctgtgaggcatgcttgccgggattttatcgactgcgttctcaaccaggtggccgcacccctggaccaaccctgggcacctgtgttccatgtcaatgtaatggacacagcagcctgtgtgaccctgaaacatcgatatgccagaattgtcaacatcacactgctggtgacttctgtgaacgatgtgctcttggatactatggaattgtcaagggattgccaaatgactgtcagcaatgtgcctgccctctgatttcttccagtaacaatttcagcccctcttgtgtcgcagaaggacttgacgactaccgctgcacggcttgtccacggggatatgaaggccagtactgtgaaaggtgtgcccctggctatactggcagtccaggcaaccctggaggctcctgccaagaatgtgagtgtgatccctatggctcactgcctgtgccctgtgaccctgtcacaggattctgcacgtgccgacctggagccacgggaaggaagtgtgacggctgcaagcactggcatgcacgcgagggctgggagtgtgttttttgtggagatgagtgcactggccttcttctcggtgacttggctcgcctggagcagatggtcatgagcatcaacctcactggtccgctgcctgcgccatataaaatgctgtatggtcttgaaaatatgactcaggagctaaagcacttgctgtcacctcagcgggccccagagaggcttattcagctggcagagggcaatctgaatacactcgtgaccgaaatgaacgagctgctgaccagggctaccaaagtgacagcagatggcgagcagaccggacaggatgctgagaggaccaacacaagagcaaagtccctgggagaattcattaaggagcttgcccgggatgcagaagctgtaaatgaaaaagctataaaactaaatgaaactctaggaactcgagacgaggcctttgagagaaatttggaagggcttcagaaagagattgaccagatgattaaagaactgaggaggaaaaatctagagacacaaaaggaaattgctgaagatgagttggtagctgcagaagcccttctgaaaaaagtgaagaagctgtttggagagtcccggggggaaaatgaagaaatggagaaggatctccgggaaaaactggctgactacaaaaacaaagttgatgatgcttgggaccttttgagagaagccacagataaaatcagagaagctaatcgcctatttgcagtaaatcagaaaaacatgactgcattggagaaaaagaaggaggctgttgagagcggcaaacgacaaattgagaacactttaaaagaaggcaatgacatactcgatgaagccaaccgtcttgcagatgaaatcaactccatcatagactatgttgaagacatccaaactaaattgccacctatgtctgaggagcttaatgataaaatagatgacctctcccaagaaataaaggacaggaagcttgctgagaaggtgtcccaggctgagagccacgcagctcagttgaatgactcatctgctgtccttgatggaatccttgatgaggctaaaaacatctccttcaatgccactgcagccttcaaagcttacagcaatattaaggactatattgatgaagctgagaaagttgccaaagaagccaaagatcttgcacatgaagctacaaaactggcaacaggtcctcggggtttattaaaggaagatgccaaaggctgtcttcagaaaagcttcaggattcttaacgaagccaagaagttagcaaatgatgtaaaagaaaatgaagaccatctaaatggcttaaaaaccaggatagaaaatgctgatgctagaaatggggatctcttgagaactttgaatgacactttgggaaagttatcagctattccaaatgatacagctgctaaactgcaagctgttaaggacaaagccagacaagccaacgacacagctaaagatgtactggcacagattacagagctccaccagaacctcgatggcctgaagaagaattacaataaactagcagacagcgtcgccaaaacgaatgctgtggttaaagatccttccaagaacaaaatcattgccgatgcagatgccactgtcaaaaatttagaacaggaagctgaccggctaatagataaactcaaacccatcaaggaacttgaggataacctaaagaaaaacatctctgagataaaggaattgataaaccaagctcggaaacaagccaattctatcaaagtatctgtgtcttcaggaggtgactgcattcgaacatacaaaccagaaatcaagaaaggaagttacaataatattgttgtcaacgtaaagacagctgttgctgataacctcctcttttatcttggaagtgccaaatttattgactttctggctatagaaatgcgtaaaggcaaagtcagcttcctctgggatgttggatctggagttggacgtgtagagtacccagatttgactattgatgactcatattggtaccgtatcgtagcatcaagaactgggagaaatggaactatttctgtgagagccctggatggacccaaagccagcattgtgcccagcacacaccattcgacgtctcctccagggtacacgattctagatgtggatgcaaatgcaatgctgtttgttggtggcctgactgggaaattaaagaaggctgatgctgtacgtgtgattacattcactggctgcatgggagaaacatactttgacaacaaacctataggtttgtggaatttccgagaaaaagaaggtgactgcaaaggatgcactgtcagtcctcaggtggaagatagtgaggggactattcaatttgatggagaaggttatgcattggtcagccgtcccattcgctggtaccccaacatctccactgtcatgttcaagttcagaacattttcttcgagtgctcttctgatgtatcttgccacacgagacctgagagatttcatgagtgtggagctcactgatgggcacataaaagtcagttacgatctgggctcaggaatggcttccgttgtcagcaatcaaaaccataatgatgggaaatggaaatcattcactctgtcaagaattcaaaaacaagccaatatatcaattgtagatatagatactaatcaggaggagaatatagcaacttcgtcttctggaaacaactttggtcttgacttgaaagcagatgacaaaatatattttggtggcctgccaacgctgagaaacttgagtatgaaagcaaggccagaagtaaatctgaagaaatattccggctgcctcaaagatattgaaatttcaagaactccgtacaatatactcagtagtcccgattatgttggtgttaccaaaggatgttccctggagaatgtttacacagttagctttcctaagcctggttttgtggagctctcccctgtgccaattgatgtaggaacagaaatcaacctgtcattcagcaccaagaatgagtccggcatcattcttttgggaagtggagggacaccagcaccacctaggagaaaacgaaggcagactggacaggcctattatgtaatactcctcaacaggggccgtctggaagtgcatctctccacaggggcacgaacaatgaggaaaattgtcatcagaccagagccgaatctgtttcatgatggaagagaacattccgttcatgtagagcgaactagaggcatctttacagttcaagtggatgaaaacagaagatacatgcaaaacctgacagttgaacagcctatcgaagttaaaaagcttttcgttgggggtgctccacctgaatttcaaccttccccactcagaaatattcctccttttgaaggctgcatatggaatcttgttattaactctgtccccatggactttgcaaggcctgtgtccttcaaaaatgctgacattggtcgctgtgcccatcagaaactccgtgaagatgaagatggagcagctccagctgaaatagttatccagcctgagccagttcccaccccagcctttcctacgcccaccccagttctgacacatggtccttgtgctgcagaatcagaaccagctcttttgatagggagcaagcagttcgggctttcaagaaacagtcacattgcaattgcatttgatgacaccaaagttaaaaaccgtctcacaattgagttggaagtaagaaccgaagctgaatccggcttgcttttttacatggctgcgatcaatcatgctgattttgcaacagttcagctgagaaatggattgccctacttcagctatgacttggggagtggggacacccacaccatgatccccaccaaaatcaatgatggccagtggcacaagattaagataatgagaagtaagcaagaaggaattctttatgtagatggggcttccaacagaaccatcagtcccaaaaaagccgacatcctggatgtcgtgggaatgctgtatgttggtgggttacccatcaactacactacccgaagaattggtccagtgacctatagcattgatggctgcgtcaggaatctccacatggcagaggcccctgccgatctggaacaacccacctccagcttccatgttgggacatgttttgcaaatgctcagaggggaacatattttgacggaaccggttttgccaaagcagttggtggattcaaagtgggattggaccttcttgtagaatttgaattcgcgacaactacaacgactggagttcttctggggatcagtagtcaaaaaatggatggaatgggtattgaaatgattgatgaaaagttgatgtttcatgtggacaatggtgcgggcagattcactgctgtctatgatgctggggttccagggcatttgtgtgatggacaatggcataaagtcactgccaacaagatcaaacaccgcattgagctcacagtcgatgggaaccaggtggaagcccaaagcccaaacccagcatctacatcagctgacacaaatgaccctgtgtttgttggaggcttcccagatgacctcaagcagtttggcctaacaaccagtattccgttccgaggttgcatcagatccctgaagctcaccaaaggcacagcaagccactggaggttaattttgccaaggccctggaactgaggggcgttcaacctgtatcatgcccagccaactaataaaaataagtgtaaccccaggaagagtctgtcaaaacaagtatatcaagtaaaacaaacaaatatattttacctatatatgttaattaaactaatttgtgcatgtacatagaattc

SEQ ID NO: 1245 - DNA, 1958 bp, Homo sapiens
  Genbank Accession No. Z78379
  misc_feature (1)..(1958): n = a or c or g or t
cattttatttaatgcagaaattctaaggtacaaaaacattnggtaantgtcagctgtgatctacttncacctagttacagagttatgtncaaatcaagtcattaacatttccaatgtcaaaaatacagcacgctgttaagagttctgtcagtgctcattatcccactagatcccacaaggggcaaactcaangatgaaacaanggcaacgccatcaataaccaccatnttccacaggctttctcccctaggacgtnctaacagggngtttccacaggggaaaaattctcttttaaaattaacagtaaaaataggagttacttactatctagatgaacacaattggtttttcacaaaaagctgttgctgctgtctggantcaccatgctttnttcttgagagaaacataccattnttgttgttgttgttgttgagacggagtttcgttcttgtngccaatattttttaanatcagaattcatcatataaanntccagattgtcagcttttcttgaaaaatgggaagatcaggaagtacttcatggccacagtcgactggaaaattacccactgtgggtggaacaggggcgcttcaggttgccacagtccccaccattccctattgttganacagacaaagtttattaattaccatttatcatcacactgctgtcttccttatccctccccttttattcttgtgccctctaaatatataatctcctctatataagcactattagtcttcaccaatagaaaataaaaaagactagtaaccttcacattggcattgcccatttctcttcaataaagacagaaataatattttctctcttctncagggagccaaattagtgttgaagttggggggccagagagttttctttcttttgggagaagggtgtgtcatttttcctcaaggaataaaattggncctcttgccccttatttcttttaaaagaaaagatgctcaactctgaaaaaaaggctctgaaaatcatgtaaccccactttttgtgaaggacagtcttcctgcttatttgcactcaagatactattatttgctcaagatactattatcttgctgggtcaccatctgaatacctgggcctggactggaatgacttctgactctttctggagatcaattgcctcaaaggcccaagacagccctctggaggagctttggcaccttgtatggctgggctgagtctgntgaggtggtctctgntgaggtggtctctgntgcttggagncantctctgagaaggcacacctttaccngagctttacccnccgtgancactctccnggcaaagctgatgacatcagatgctaagtcctctctgtagctcattgggtaagttaagatgaacaactagcactctaccttcagctacccgcaggcttcttggttttcctggaaacctggacttatccctggtctcttttctagaggacattgtctaacctatctacacaagccttttactctcaggatcaaggcctctcatggagatcatcctgttttccatttcttgtttccataatatctaaaaccctttaccttgccaaacctttttcctaatttcctcctttttcccccctcctggaccatttcctaatccaaaaattccacctttccttaaaccaatttttttcccttatcctccaggccacgattcccatttctagcatactggggagagtagaaaaagtgaaactaattaaacaaaactaggaagttggacttctcaatttattctgaggcaatcacactatggtttcattactcggtatattaagagtttgattttattgatcagaaacattagtatttcaacataagtatcaaaaccctaaatccaaactaaaacatcccgattttttaactagcactctctttttctcttccattttcttaaggagtgttttcacatancaagctctctncccacn

SEQ ID NO: 1246 - DNA, 676 bp, Homo sapiens
  Genbank Accession No. Z99386
ttttttatctgcacatactaagttgcttttattaatccagaacggcatgctacagatactgtacagcatgaacatttattcattacaaaaatggcttccaaaccattaaaaatgaacttggaataagagcataaaacggaacagtaacatcacaactgttaggaaacattcaaagtattcacaaaaaatgttatagttagcattttaataaaccagagaaaaatcggagacagttttacaatcgcttcatgtcaactacaatggcactgaatgaacaggtttcagctttatacagcattttgcaacatcaacatgcctaggttttttttatttttaaagtctgctgcctactcgtatgtaatatgtgtacataaaagcggcagctggtttttcgtttaagagtaatctaatatacagaattttggcccttaagggtttatacctcttcatttaaaatgctttctggacaatctgctaccaaacacattttgttataggtgacattaaaactacatacaaatctacctatgtaacatcacagcaaaacatgatgaacaaaaattacagcatcaaaaagaaggagaaagctaaattcactgagaattttggcacgtaaagttttgtacacggtcagtccgggtcctaagggcgcagggtagggcatcccactgggagt

What is claimed is:

1. A method of diagnosing breast cancer in a patient, comprising:
(a) detecting the level of expression in a tissue sample of two or more genes from Tables 1-5; wherein differential expression of the genes in Tables 1-5 is indicative of breast cancer.

2. A method of detecting the progression of breast cancer in a patient, comprising:
(a) detecting the level of expression in a tissue sample of two or more genes from Tables 1-5; wherein differential expression of the genes in Tables 1-5 is indicative of breast cancer progression.

3. A method of monitoring the treatment of a patient with breast cancer, comprising:
(a) administering a pharmaceutical composition to the patient;
(b) preparing a gene expression profile from a cell or tissue sample from the patient; and
(c) comparing the patient gene expression profile to a gene expression from a cell population selected from the group consisting of normal breast cells and cancerous breast cells.

4. A method of treating a patient with breast cancer, comprising:
(a) administering to the patient a pharmaceutical composition, wherein the composition alters the expression of at least one gene in Tables 1-5;
(b) preparing a gene expression profile from a cell or tissue sample from the patient comprising tumor cells; and
(c) comparing the patient expression profile to a gene expression profile selected from the group consisting of normal breast cells and cancerous breast cells.

5. A method of typing breast cancer in a patient, comprising:
(a) detecting the level of expression in a tissue sample of two or more genes from Tables 1-5; wherein differential expression of the genes in Tables 1-5 is indicative of a type of breast cancer selected from a group consisting of infiltrating ductal carcinoma, microinvasive carcinoma, cribiform carcinoma, stage I carcinoma, stage II carcinoma, stage III carcinoma or lobular carcinoma.

6. A method of detecting the presence or progression of infiltrating ductal carcinoma in a patient, comprising:
(a) detecting the level of expression in a tissue sample of two or more genes from Tables 1-5; wherein differential expression of the genes in Tables 1-5 is indicative of infiltrating ductal carcinoma progression.

7. A method of monitoring the treatment of a patient with infiltrating ductal carcinoma, comprising:
(a) administering a pharmaceutical composition to the patient;
(b) preparing a gene expression profile from a cell or tissue sample from the patient; and
(c) comparing the patient gene expression profile to a gene expression from a cell population comprising normal breast cells or to a gene expression profile from a cell population comprising infiltrating ductal carcinoma cells or to both.

8. A method of treating a patient with infiltrating ductal carcinoma, comprising:
(a) administering to the patient a pharmaceutical composition, wherein the composition alters the expression of at least one gene in Tables 1-5;
(b) preparing a gene expression profile from a cell or tissue sample from the patient comprising infiltrating ductal carcinoma cells; and
(c) comparing the patient expression profile to a gene expression profile from an untreated cell population comprising infiltrating ductal carcinoma cells.

9. A method of diagnosing a microinvasive form of breast tumor in a patient, comprising:
(a) detecting the level of expression in a tissue sample of two or more genes from Tables 1-5; wherein differential expression of the genes in Tables 1-5 is indicative of a microinvasive form of breast cancer.

10. A method of detecting the progression of a microinvasive for of breast cancer in a patient, comprising:
(a) detecting the level of expression in a tissue sample of two or more genes from Tables 1-5; wherein differential expression of the genes in Tables 1-5 is indicative of the progression of a microinvasive form of breast cancer.

11. A method of monitoring the treatment of a patient with a microinvasive form of breast cancer, comprising:
(a) administering a pharmaceutical composition to the patient;
(b) preparing a gene expression profile from a cell or tissue sample from the patient; and
(c) comparing the patient gene expression profile to a gene expression from a cell population comprising normal breast cells or to a gene expression profile from a cell population comprising microinvasive breast cancer cells or to both.

12. A method of treating a patient with a microinvasive form of breast cancer, comprising:
(a) administering to the patient a pharmaceutical composition, wherein the composition alters the expression of at least one gene in Tables 1-5;
(b) preparing a gene expression profile from a cell or tissue sample from the patient comprising microinvasive breast cancer cells; and
(c) comparing the patient expression profile to a gene expression profile from an untreated cell population comprising microinvasive breast cancer cells.

13. A method of differentiating microinvasive breast cancer from a benign growth in a patient, comprising:
(a) detecting the level of expression in a tissue sample of two or more genes from Tables 1-5; wherein differential expression of the genes in Tables 1-5 is indicative of microinvasive breast cancer rather than benign growth.

14. A method of screening for an agent capable of modulating the onset or progression of breast cancer, comprising:
(a) preparing a first gene expression profile of a cell population comprising breast cancer cells, wherein the expression profile determines the expression level of one or more genes from Tables 1-5;
(b) exposing the cell population to the agent;
(c) preparing second gene expression profile of the agent-exposed cell population; and
(d) comparing the first and second gene expression profiles.

15. The method of claim 14, wherein the breast cancer is a infiltrating ductal carcinoma.

16. The method of claim 14, wherein the breast cancer is a microinvasive breast cancer.

17. A composition comprising at least two oligonucleotides, wherein each of the oligonucleotides comprises a sequence that specifically hybridizes to a gene in Tables 1-5.

18. A composition according to claim 17, wherein the composition comprises at least 3 oligonucleotides.

19. A composition according to claim 17, wherein the composition comprises at least 5 oligonucleotides.

20. A composition according to claim 17, wherein the composition comprises at least 7 oligonucleotides.

21. A composition according to claim 17, wherein the composition comprises at least 10 oligonucleotides.

22. A composition according to any one of claims 17-21, wherein the oligonucleotides are attached to a solid support.

23. A composition according to claim 22, wherein the solid support is selected from a group consisting of a membrane, a glass support, a filter, a tissue culture dish, a polymeric material, a bead and a silica support.

24. A solid support comprising at least two oligonucleotides, wherein each of the oligonucleotides comprises a sequence that specifically hybridizes to a gene in Tables 1-5.

25. A solid support according to claim 24, wherein the oligonucleotides are covalently attached to the solid support.

26. A solid support according to claim 24, wherein the oligonucleotides are non-covalently attached to the solid support.

27. A solid support according to claim 24, wherein the support comprises at least about 10 different oligonucleotides in discrete locations per square centimeter.

28. A solid support according to claim 24, wherein the support comprises at least about 100 different oligonucleotides in discrete locations per square centimeter.

29. A solid support according to claim 24, wherein the support comprises at least about 1000 different oligonucleotides in discrete locations per square centimeter.

30. A solid support according to claim 24, wherein the support comprises at least about 10,000 different oligonucleotides in discrete locations per square centimeter.

31. A computer system comprising:
(a) a database containing information identifying the expression level in breast tissue of a set of genes comprising at least two genes in Tables 1-5; and
(b) a user interface to view the information.

32. A computer system of claim 31, wherein the database further comprises sequence information for the genes.

33. A computer system of claim 31, wherein the database further comprises information identifying the expression level for the genes in normal breast tissue.

34. A computer system of claim 31, wherein the database further comprises information identifying the expression level for the genes in breast cancer tissue.

35. A computer system of claim 34, wherein the breast cancer tissue comprises infiltrating ductal carcinoma cells.

36. A computer system of claim 34, wherein the breast cancer tissue comprises microinvasive breast cancer cells.

37. A computer system of any of claims 31-36, further comprising records including descriptive information from an external database, which information correlates said genes to records in the external database.

38. A computer system of claim 37, wherein the external database is GenBank.

39. A method of using a computer system of any one of claims 31-36 to present information identifying the expression level in a tissue or cell of at least one gene in Tables 1-5, comprising:
(a) comparing the expression level of at least one gene in Tables 1-5 in the tissue or cell to the level of expression of the gene in the database.

40. A method of claim 39, wherein the expression level of at least two genes are compared.

41. A method of claim 39, wherein the expression level of at least five genes are compared.

42. A method of claim 39, wherein the expression level of at least ten genes are compared.

43. A method of claim 39, further comprising displaying the level of expression of at least one gene in the tissue or cell sample compared to the expression level in breast cancer.

44. A kit comprising at least one solid support of any one of claims 24-30 packaged with gene expression information for said genes.

45. A kit of claim 44, wherein the gene expression information comprises gene expression levels in a breast cancer tissue or cell sample.

46. A kit of claim 45, wherein the gene expression information is in an electronic format.
